(19) United States
(12) Patent Application Publication
(10) Pub. No.: US 2023/0332159 A1
(43) Pub. Date: Oct. 19, 2023

(54) MATERIALS AND METHODS FOR THE DELIVERY OF THERAPEUTIC NUCLEIC ACIDS TO TISSUES

(71) Applicants: University of Miami, Miami, FL (US); University of Modena And Reggio Emilia - Unimore, Modena (IT)

(72) Inventors: Paolo Serafini, Miami Shores, FL (US); Dimitri Van Simaeys, Miami Beach, FL (US); Adriana De La Fuente, Miami, FL (US); Alessia Zoso, Miami Shores, FL (US); Silvio Bicciato, Modena (IT); Jimmy Caroli, Modena (IT); Cristian Taccioli, Legnaro (IT); Andrea Grilli, Modena (IT); Midhat Abdulreda, Hialeah Gardens, FL (US)

(21) Appl. No.: 17/985,683

(22) Filed: Nov. 11, 2022

Related U.S. Application Data
(62) Division of application No. 17/053,193, filed on Nov. 5, 2020, now Pat. No. 11,584,935.
(60) Provisional application No. 62/668,463, filed on May 8, 2018.

(51) Int. Cl. C12N 15/113; C12N 15/115; A61P 37/06; G01N 33/50; G01N 33/566; A61P 3/10

(52) U.S. Cl. CPC C12N 15/115; A61P 3/10; A61P 37/06; C12N 15/113; G01N 33/507; G01N 33/566; A61K 48/00

(57) ABSTRACT

The present disclosure provides materials and methods for the delivery of therapeutic nucleic cells (and imaging agents) to tissues.

### CROSS-REFERENCE TO RELATED APPLICATIONS

[0001] The present application is a divisional of U.S. Application No. 17/053,193 filed Nov. 5, 2020 (now U.S. Pat. No. 11,584,935), which is a national phase application of International Application No. PCT/US19/31346 filed May 8, 2019, and which claims the benefit of priority to U.S. Provisional Application No. 62/668,463 filed May 8, 2018, the disclosures of which are incorporated herein by reference in their entirety.

### FIELD OF THE INVENTION

[0002] The present disclosure provides materials and methods for the delivery of therapeutic nucleic cells (and imaging agents) to tissues.

### STATEMENT OF GOVERNMENT SUPPORT

[0003] This invention was made with government support under grant number DK116241 awarded by the National Institutes of Health. The government has certain rights in the invention.

### INCORPORATION BY REFERENCE OF MATERIALS SUBMITTED ELECTRONICALLY

[0004] This application contains, as a separate part of the disclosure, a Sequence Listing in computer readable form (Filename: 53048B_Seqlisting.xml; Size: 3,380,995 bytes; Created: May 22, 2023, which is incorporated by reference in its entirety.

### BACKGROUND

[0005] Diabetes is a group of metabolic disorders in which there are high blood sugar levels over a prolonged period caused by the insufficiency of the hormone insulin produced by the pancreatic beta cells. In particular, type 1 diabetes is caused by the progressive autoimmune destruction of beta cells whereas in type 2 diabetes insulin is not produced in quantities sufficient for the body needs. Although for many years the contribution of beta cell loss to type 2 diabetes was debated, in the last decade it became clear that a loss of beta cells is involved also in the pathophysiology of type 2 diabetes (Rojas et al., Journal of Diabetes Research, vol. 2018, Article ID 9601801, 19 pages, 2018; Donath et al., Diabetes. 2005 Dec;54 Suppl 2:S108-13). Despite this knowledge to date there are no available methods to directly measure the number of beta cell (beta cell mass) in vivo or to deliver therapeutics specifically to these important cells. Indeed, methods to determine diabetes progression rely mostly on the indirect measurement (i.e the determination of glucose or c-peptide concentration in the blood) and cannot discriminate whether many cells produce little insulin or few cells produce large quantities of this hormone. Thus, these methods cannot measure the progressive beta cell loss in patients with diabetes. The lack of adequate marker specific for beta cell make also impossible to deliver therapeutics specifically to beta cells to halt or reverse beta cell loss.

[0006] RNA aptamers have emerged as effective delivery vehicles for siRNAs in the treatment of many human diseases because they actively enhance the intracellular accumulation of therapeutic cargo by receptor-mediated internalization or by clathrin-mediated endocytosis (35-39,43-74). The use of aptamers to deliver the therapeutic RNA of interest to the β cells offers advantage over the use of viral vectors such for example the transient modulation of the gene of interest, the lack of immunogenicity, and a great safety profile. To date, adenoviral vectors have been mostly used for efficient delivery of genes and siRNA to primary pancreatic islets in vitro (79-84). In vivo, however, beside the technical difficulties in using of viral vectors, their inherent immunogenicity and possible recombination with wild type virus raises serious safety concerns. Indeed, viral vectors can induce strong immune responses with secondary complications that may include multi-organs failure and even death (85). The advent of lentiviral vectors alleviated some of the immunogenicity concerns, but lentiviruses are not as efficient as adenoviruses in transducing intact human islets (86,87); although current in vitro protocols are being optimized88. Nevertheless, lentiviral integration in the genome still raises safety concerns, risks of insertional mutagenesis and recombination with wild type viruses.

### SUMMARY

[0007] In one aspect, the disclosure provides a method of delivering one or more agents to a tissue comprising contacting the tissue with a construct comprising an aptamer that is specific for the tissue conjugated to the agent. In some embodiments, the tissue is from an organ selected from the group consisting of pancreas, heart, lung, kidney, stomach, skin and brain. In some embodiments, the tissue is pancreatic islets. In some embodiments, the agent is a therapeutic nucleic acid. In some embodiments, the therapeutic nucleic acid is a therapeutic RNA. In some embodiments, the therapeutic RNA is selected from the group consisting of siRNA and saRNA. In some embodiments, the agent is an imaging reagent. Exemplary imaging reagents include, but are not limited to, fluorochromes, Positron emission tomography tracer such as Fluorine-18, oxygen-15, gallium 68, magnetic resonance imaging contrast agents such as gadolinium, iron oxide, iron platinum and manganese. The contacting step can occur in vitro or in vivo.

[0008] In another aspect, the disclosure provides a construct comprising an aptamer conjugated to a small activating RNA (saRNA). In some embodiments, the aptamer is specific for human pancreatic islets. In some embodiments, the aptamer is selected from the group consisting of M12-3773 and 1-717.

[0009] In some embodiments, the aptamer is specific for clusterin (CLU, gene id 1191). In some embodiments, the aptamer is specific for “Transmembrane emp24 domain-containing protein 6” (TMED6, gene id 146456).

[0010] In some embodiments, the tissue is adrenal tissue or bone marrow and the aptamer is is 173-2273, 107-901 or m6-3239. In some embodiments, the tissue is breast tissue, lung tissue or lymph node tissue and the aptamer is 107-901 and m6-3239. In some embodiments, the tissue is brain cerebellum and the aptamer is 173-2273, 107-901, m1-2623 or m6-3239. In some embodiments, the tissue is brain cerebral cortex tissue, pituitary tissue, colon tissue, endothelium tissue, esophagus tissue, heart tissue or kidney tissue and the aptamer is 107-901, m1-2623 or m6-3239. In some embodiments, the tissue is fallopian tube tissue and the aptamer is m6-3239. In some embodiments, the tissue is liver tissue and the aptamer is 166-279, 107-901, m1-2623 or m6-3239. In some embodiments, the tissue is ovarian tissue and the aptamer is 107-901. In some embodiments, the tissue is placenta tissue and the aptamer is 166-270, 173-2273, 107-901, m1-2623 or m6-3239. In some embodiments, the tissue is prostate tissue and the aptamer is 173-2273 or 107-901. In some embodiments, the tissue is spinal cord tissue and the aptamer is 166-279 or 173-2273. In some embodiments, the tissue is testis tissue and the aptamer is 166-279, 173-2273, 107-901, m1-2623, m6-3239 and m12-3773. In some embodiments, the tissue is thymus tissue and the aptamer is 173-2273, 107-901 or mf-2623. In some embodiments, the tissue is thyroid tissue and the aptamer is m1-2623. In some embodiments, the tissue is ureter tissue and the aptamer is 107-901. In some embodiments, tissue is cervical tissue and the aptamer is 166-279. In some embodiments, the tissue is islets of Langerhans or pancreatic tissue and the aptamer is 166-279, 173-2273, 107-901, 1-717, m1-2623, m6-3239 or m12-3773.

[0011] In another aspect, the disclosure provides a method of delivering one or more agents to pancreatic islets comprising contacting the islets with a construct comprising an aptamer that is specific for islets conjugated to the agent. In some embodiments, the agent is a therapeutic nucleic acid. In some embodiments, the therapeutic nucleic acid is a therapeutic RNA. In some embodiments, the therapeutic RNA is selected from the group consisting of siRNA and saRNA. In some embodiments, the agent is an imaging reagent. Exemplary imaging reagents include, but are not limited to, fluorochromes, Positron emission tomography tracer such as Fluorine-18, oxygen-15, gallium 68, magnetic resonance imaging contrast agents such as gadolinium, iron oxide, iron platinum and manganese. The contacting step can occur in vitro or in vivo.

[0012] In some embodiments, the aptamer is selected from the group consisting of M12-3773 and 1-717. In some embodiments, the aptamer is specific for clusterin (CLU, gene id 1191). In some embodiments, the aptamer is specific for “Transmembrane emp24 domain-containing protein 6” (TMED6, gene id 146456).

[0013] In another aspect, the disclosure provides a method of measuring beta cell mass comprising contacting the beta cell with a construct comprising an aptamer conjugated to an imaging reagent in an amount effective to measure the mass of the beta cell. In some embodiments, the aptamer is selected from the group consisting of M12-3773 and 1-717. In some embodiments, the imaging reagent is a fluorochrome. In some embodiments, the imaging reagent is a PET tracer. In some embodiments, the imaging reagent is a MRI contrast reagent. In some embodiments, the imaging reagent can be conjugated to the aptamer via chelators.

[0014] In another aspect, the disclosure provides a method of modulating proliferation of beta cell comprising contacting the beta cell with a construct comprising an aptamer conjugated to a therapeutic nucleic acid in an amount effective to modulate proliferation of the beta cell. In some embodiments, the aptamer is selected from the group consisting of M12-3773 and 1-717. In some embodiments, the therapeutic nucleic acid is a therapeutic RNA. In some embodiments, the therapeutic RNA is selected from the group consisting of siRNA and saRNA. The contacting step can occur in vitro or in vivo.

[0015] In another aspect, the disclosure provides a method for inhibiting beta cell apoptosis comprising contacting the beta cell with a construct comprising an aptamer conjugated to a therapeutic nucleic acid in an amount effective to inhibit apoptosis of the beta cell. In some embodiments, the aptamer is selected from the group consisting of M12-3773 and 1-717. In some embodiments, the therapeutic nucleic acid is a therapeutic RNA. In some embodiments, the therapeutic RNA is selected from the group consisting of siRNA and saRNA. In some embodiments the therapeutic RNA upregulate the protein XIAP (X-linked inhibitor of apoptosis gene id 331). The contacting step can occur in vitro or in vivo.

[0016] In another aspect, the disclosure provides a method for inhibiting tissue graft apoptosis in a subject in need thereof comprising contacting the tissue graft with a construct comprising an aptamer conjugated to a therapeutic nucleic acid in an amount effective to inhibit apoptosis of the tissue graft. In some embodiments, the therapeutic nucleic acid is a therapeutic RNA. In some embodiments, the therapeutic RNA is selected from the group consisting of siRNA and saRNA. In some embodiments, the therapeutic RNA upregulates the protein XIAP (X-linked inhibitor of apoptosis gene id 331). The contacting step can occur in vitro or in vivo. In some embodiments, the tissue graft is from an organ selected from the group consisting of pancreas, heart, lung, kidney, stomach and skin. In some embodiments, the aptamer is a muscle specific aptamer and the tissue is heart tissue.

[0017] In some embodiments, the tissue is contacted with the therapeutic RNA that upregulates the protein XIAP in the absence of an aptamer. For example, in another aspect, the disclosure provides a method for inhibiting tissue graft apoptosis in a subject in need thereof comprising contacting the tissue graft with a therapeutic RNA that upregulates the protein XIAP (X-linked inhibitor of apoptosis gene id 331) in an amount effective to inhibit apoptosis of the tissue graft. The contacting step can occur in vitro or in vivo. In some embodiments, the tissue graft is from an organ selected from the group consisting of pancreas, heart, lung, kidney, stomach and skin.

[0018] In another aspect, the disclosure provides a method for protecting a beta cell from T-cell mediated cytotoxicity of the beta cell comprising contacting the beta cell with a construct comprising an aptamer conjugated to a therapeutic nucleic acid in an amount effective to inhibit T cell mediated cytotoxicity of the beta cell. In some embodiments, the aptamer is selected from the group consisting of M12-3773 and 1-717. In some embodiments, the therapeutic nucleic acid is able to increase immune checkpoint. In some embodiments, the therapeutic nucleic acid is a therapeutic RNA. In some embodiments, the therapeutic RNA is selected from the group consisting of siRNA and saRNA. In some embodiments the therapeutic RNA upregulate the protein CD274 (Programmed death-ligand 1, PDL1, gene id 29126). The contacting step can occur in vitro or in vivo.

[0019] In another aspect, the disclosure provides a method of treating diabetes in a subject in need thereof comprising administering to the subject a construct comprising an aptamer conjugated to a small activating RNA (saRNA) in an amount effective to treat diabetes in the subject. In some embodiments, the aptamer is selected from the group consisting of M12-3773 and 1-717.

[0020] In another aspect, one or more aptamers specific for the beta cells can be used in combination to increase delivery of the therapeutic agent or imaging reagents. In some embodiments, the aptamers are selected from the group consisting of M12-3773 and 1-717.

[0021] An aptamer comprising a nucleotide sequence set forth in SEQ ID NO: 264 or 259 is also contemplated. In some embodiments, the aptamer is conjugated to an saRNA. In some embodiments, the saRNA upregulates the protein XIAP (X-linked inhibitor of apoptosis gene id 331). In some embodiments, saRNA upregulates the protein CD274 (Programmed death-ligand 1, PDL1, gene id 29126,

### BRIEF DESCRIPTION OF THE FIGURES

[0022] FIG. 1 is a flow chart showing HT-cluster SELEX as an unsupervised strategy for the isolation of aptamers specific for human islets using human islets and acinar tissue.

[0023] FIGS. 2A and 2B provide a flow chart showing HT-Toggle-cluster SELEX to isolate islets specific aptamers crossreacting between mouse and human. 8 cycles of HT-cluster SELEX were performed as described in FIG. 1 using as negative and positive selectors mouse acinar tissues and mouse islets respectively (FIG. 2A). The resulting polyclonal aptamer from cycle 8 was used for two additional cycle of selection using either acinar tissue and islets from mice or acinar tissue and islets isolated from cadaveric donors (FIG. 2B).

[0024] FIG. 3 shows images resulting from HT-Toggle-cluster SELEX to isolate islets specific aptamers crossreacting between mouse and human.

[0025] FIG. 4 shows images resulting from HT-Toggle-cluster SELEX identifying monoclonal aptamers that rcognize human islets but not human acinar tissue.

[0026] FIGS. 5A and 5B show that aptamers 1-717 (FIG. 5A) and M12-3772 (FIG. 5B) show an extraordinary specificity for human islets. FIG. 5C is a table showing the results of various tissue staining with various selected aptamers.

[0027] FIG. 6 shows that aptamers 1-717 and M12-3772 recognize mouse islets and other mouse tissues.

[0028] FIGS. 7A-7D shows that aptamers 1-717 (FIGS. 7B and 7C) and M12-3773 (FIGS. 7A and 7D) recognize preferentially human beta cells.

[0029] FIGS. 8A-8C show that clusterin is a possible target for aptamer m12-3773. FIG. 8A provides the strategy for an aptamer based mass spectrometry and mascot-based analysis. Clusterin (UniProtKB - P10909) (FIG. 8B) had a high Mascot score (236). FIG. 8C shows that silencing of Clusterin reduced the capacity of aptamer m12-7337, but not of aptamer 1-717, to bind to beta cells.

[0030] FIGS. 9A-9C shows that TMED6 is the putative target for aptamer 1-717. FIG. 9A shows the experimental strategy to detect the target for aptamer 1-717. FIG. 9B provides results of the binding array assay described in Example 1. FIG. 9C is a graph showing that competitive assays confirm the specificity of aptamer 1-717 for TMED6

[0031] FIGS. 10A and 10B shows that a mixture of aptamer 1-717 and m12-3773 recognize human islets in vivo better than the individual clones. A cumulative-synergistic signal was observed in the EFP region when the mixture of both aptamers was used possibly because different islet epitopes were targeted by each aptamer (FIG. 10A). 4 hour later fluorescence signal in epididymal fat pad region was measure by “In vivo imaging system (IVIS)”. The data in FIG. 10B shows that both aptamer 1-717 and aptamer m12-3773 can recognize the islets in vivo.

[0032] FIGS. 11A-11C show that Aptamer 1-717 and M12-3773 allow the measurement of human beta cell mass in vivo. FIG. 11A is a schematic of the experiment performed in Example 2. FIGS. 11B and 11C show that fluorescence signal in the EFP region was proportional to the number of engrafted islets indicating that these aptamers can be used to measure β cell mass in vivo FIG. 11D: Syngeneic (Balb/c) or allogeneic (C57B⅙) ilsets were transplanted subcutaneously (in the right and left flank respectively) of immunocompetent Balb/c mice. Rejection was longitudinally monitored by injecting AF750-conjugated aptamer intravenously and by performing IVIS 5 hours later. Data show that rejection of the allogeneic C57B16 islet graft can be measured over time as seen by the loss of signal on the left flank. Instead signal (right) of the syngeneic islet graft is maintained over time indicating graft survival.

[0033] FIG. 12 is a schematic diagram aptamer chimera for the delivery of therapeutic RNA via islets specific aptamers.

[0034] FIGS. 13A and 13B show that islets specific aptamer chimera allows for the delivery of therapeutic RNA via islets specific aptamers. FIG. 13A is a schematic of the experimental procedure. FIG. 13B shows that the aptamer chimera significantly downregulate the expression of the target gene.

[0035] FIGS. 14A-14C shows that p57kip2-siRNA-islet specific aptamer chimera induce human beta cell proliferation in vivo. FIG. 14A shows the experimental procedure: Streptozotocin-treated, immune deficient NSG mice were transplanted with a suboptimal quantity (250 IEQ) of human islets in the anterior chamber of the eye. FIG. 14B provides immunofluorescence pictures of the graft from mice treated with control chimera or p57kip2-siRNA/aptamer chimera. Glucagon and insulin staining is depicted in dark gray as pseudocolor whereas BrdU staining as measure of cell proliferation is depicted in white as pseudocolor. FIG. 14C shows quantification of proliferating beta and alpha cells. Taken together these data indicate that p57kip2-siRNA/aptamer chimera can induce in vivo human beta cell proliferation in a hyperglycemic setting that mimic T1 and T2 diabetes.

[0036] FIG. 15A provides a schematic of the method described in Example 4. FIG. 15B shows the identification of small activating RNA (saRNA) specific for the human “X-Linked Inhibitor Of Apoptosis” (Xiap, Gene ID: 331).

[0037] FIGS. 16A-16C. Xiap-saRNA aptamer chimera protect human beta cells from cytokine induced apoptosis. FIG. 16A shows the experimental procedure described in Example 5. FIG. 16B shows the flow cytometry analysis of single cell suspension of islets treated with scrambled saRNA chimera (CTRL chimera) or XIAP-saRNA/aptamer chimera (Xiap Chimera) and later challenged with cytokines (CTK) or left untreated (No CTK). FIG. 16C is a spaghetti plot from 5 independent experiments each with islets from a different cadaveric donor using chimera generated with either aptamer m12-3773 or aptamer 1-717.

[0038] FIGS. 17A and B show that the Xiap-saRNA/islet specific aptamer chimera protect beta cells from primary nonfunction. FIG. 17A is a schematic for the experiment described in Example 5. FIG. 17B: human Islets were cultured in media where chimera was added at 48h, 24h and on the day of transplantation 600 IEQ were transplanted per mouse in the left kidney capsule of streptozotocin diabetic NOG mice. Data showed that pretreatment of human islets with aptamer chimera greatly improve the efficacy of islet transplantation with approximately 80% of mice becoming normoglycemic by day 2. In contrast only 50% of mice engrafted with islets (P=0.02; n_{chimera treated}= 10; n_{untreated} = 8) reverse diabetes and with a delayed kinetic.

[0039] FIGS. 18A-18B. FIG. 18A provides a schematic of the protocol described in Example 6. FIG. 18B is a graph showing the identification of small activating RNA (saRNA) specific for the human “PDL1” (CD274, Twelve saRNAs (provided in Table 5) were found to upregulate Xiap expression more than 10 times (range 10.4-74.8) over scrambled saRNA. Gene ID: 29126).

[0040] FIGS. 19A -19B PDL1-saRNA/islet specific aptamer chimera upregulate PDL1 on human beta cells. FIG. 19A is a schematic showing that PDL1-saRNA/aptamer chimera were added to non-dissociated human islets from cadaveric donor. 48h later, islets were dissociated, labelled with anti-insulin, anti-glucagon and anti-PDL1 antibodies and analyzed by flow cytometry. Results of the flow cytometery is shown in FIG. 19B.

[0041] FIGS. 20A-20C. PDL1-saRNA/aptamer chimera upregulate PDL1 in vivo. FIG. 20A provides a schematic of a protocol where immune deficient NSG mice were transplanted in the anterior chamber of the eye with human islets from a cadaveric donor. 3 weeks later, mice were treated with PDL1-saRNA(636)/1-717-aptamer chimera. Scramble-saRNA/aptamer chimera was used as control (CTRL chimera). FIG. 20B are images showing PDL1 expression in tissues. FIG. 20C provides graphs summarizing of PDL1 expression on the engrafted islets at baseline or 5 days after treatment with PDL1-saRNA/aptamer chimera or scrambled-saRNA/aptamer chimera.

### DETAILED DESCRIPTION

[0042] As described in the Examples, therapeutic RNA/aptamer chimeras were generated to modulate gene expression in human β cells in vivo to induce their transient proliferation and improve their resistance to auto/alloimmunity. In particular, we have optimized and validate the use of islet-specific aptamers to deliver: A) siRNA against p57kip2 to induce β cell proliferation, B) saRNA promoting Xiap expression to protect islets from apoptosis, and C) saRNA promoting PDL1 expression to protect β cells from T cell cytotoxicity. Because of the absence of reliable humanized mouse model of autoimmune T1D, our approach is based on the use of NSG or humanized NSG mice transplanted with human islets before aptamer treatment. The use of human islets is dictated by species specific difference in p57kip2 biology (14) and by the specificity of PDL1 and Xiap saRNAs for the human genes. Ex vivo and innovative in vivo techniques are employed to quantify the response to in vivo treatment through imaging of β cell proliferation, apoptosis, and interaction with the immune system. We envision the use of these aptamers as mono or multimodal approach where difference genes can be modulated simultaneously.

[0043] The in vivo use of RNA aptamers is particularly appealing because this class of molecules has low immunogenicity, high capacity to penetrate deep into the tissues, and ability to recognize the cognate target with high affinity and specificity. The fluorinated backbone of the aptamers make them resistant to RNAse degradation and incapable to trigger TLR signaling (41,42). RNA aptamers have emerged as effective delivery vehicles for siRNAs and other drugs to specific cell subsets or tissues for the treatment of many human diseases (60,62-75). Indeed, through the interactions between the aptamer and its cellular membrane target, aptamers actively enhance the intracellular accumulation of therapeutic agents (37-39,43-61). Some aptamer drugs are FDA-approved and more than 30 are being tested in clinical trials (16-24). When administered in vivo, aptamers that do not find a specific target are rapidly eliminated via the kidney; those that find their target in tissues or cells remain detectable for up two weeks. Their bioavailability, plasma half-life, and pharmacokinetic properties can be easily engineered by increasing their size by the addition of Polyethylene glycol (PEG) during synthesis, or by conjugation with nanoparticles (60,62-74). Aptamers can be conjugated to siRNA, miRNA or saRNA to deliver the desirable therapeutic effect in specific targets. The ability to directly engineer aptamers with high specificity and defined functions is a distinct advantage over antibodies and other small molecules.

### EXAMPLES

### Example 1 - Isolation of Monoclonal RNA Aptamer Specific for Human Islets

[0044] Unsupervised toggled-SELEX was performed starting with a polyclonal aptamer library against mouse islets and using islet depleted human acinar cells and handpicked human islets from 4 different cadaveric donors as negative and positive selectors, respectively. This allowed for the depletion of non-specific (acinar tissue binding) RNA aptamers and enrich the library for those aptamers specific for mouse and human islets.

[0045] As shown in FIG. 1, HT-cluster SELEX was used as an unsupervised strategy for the isolation of aptamers specific for human islets using human islets and acinar tissue. A random aptamer library was generated by PCR and Durascribe T7 RNA transcription from a cDNA random library (TCT CGG ATC CTC AGC GAG TCG TC TG (N40) CCG CAT CGT CCT CCC TA (SEQ ID NO: 413), comprising a 40-nt variable region flanked by two constant region. 5 ug (~8.3×10¹³ aptamers) of this random library were depleted for aptamers binding the acinar tissue using islets depleted pancreata (negative selector) from cadaveric donors. Unbound aptamers were then incubated with hand-picked islets (100-300 IEQ as positive selector) from cadaveric donors. Islets were washed with PBS and islets-bound aptamers were recovered by RNA extraction and re-amplified by RT-PCR and T7-RNA polymerase using 2′-Fluorine-dCTP (2′-F-dCTP) and 2′-Fluorine-dUTP (2′-F-dUTP), ATP, and GTP for improved RNAse resistance. The resulting RNA aptamer library (Table 1), enriched for islets specific aptamers, was used for new selection cycle. A total of 8 selection cycles was performed using islets and acinar tissue from 4 unrelated cadaveric donors. Library from each cycles were HT sequenced and subject to bio-informatic analysis to perform frequency and cluster analysis and identify those monoclonal aptamer and family of aptamers enriched during the selection process. The most frequent monoclonal aptamers among the most frequent families present on the library from cycle 8 were chosen for empirical testing.

TABLE 2

Putative human islet specific aptamers isolated via cluster SELEX (from FIG. 1 )
Putative human islet specific aptamers isolated via cluster SELEX (from FIG. 1 )

| aptamer name | SEQ ID NO. | sequence |
|---|---|---|
| 279 | 1 | GGAGGAGCUACGAUGCGGCCGAUUUCGUCAUCCUCCAUA CCAUCGCCUUACCGUUCCGCGUCAGACGACUCGCUGAGGAUCCG ACA |
| 2529 | 2 | GGAGGAGCUACGAUGCGGCCGUCUCGCUCUCAUCCCAUGCA CGAAACCUCUCUCACUGCACAGACGACUCGCUGAGGAUCCGACA |
| 2031 | 3 | GGAGGAGCUACGAUGCGGUGAAUUCUUCCGGCACUUUGUCA UCUUCACCCCCAUGCUGCACAGACGACUCGCUGAGGAUCCGACA |
| 1134 | 4 | GGAGGAGCUACGAUGCGGCCGAUUUCGUCAUCCUCCAUACCA UCGCCUCACCGUUCCGCGUCAGACGACUCGCUGAGGAUCCGACA |
| 664 | 5 | GGAGGAGCUACGAUGCGGCCGAUUUCGUCAUCCUCCACACCAUC G CCUUACCGUUCCGCGUCAGACGACUCGCUGAGGAUCCGACA |
| 877 | 6 | GGAGGAGCUACGAUGCGGCCGAUUUCGUCAUCCUCCGUACCAUC GC CUUACCGUUCCGCGUCAGACGACUCGCUGAGGAUCCGACA |
| 2437 | 7 | GGAGGAGCUACGAUGCGGCCCAUCACUCCCGCGUAUUGCGAACG CAU CGUUAUUUAGCCGUCAGACGACUCGCUGAGGAUCCGACA |
| 1131 | 8 | GGAGGAGCUACGAUGCGGUCGAUUUCGUCAUCCUCCAUACCAUC GCC UUACCGUUCCGCGUCAGACGACUCGCUGAGGAUCCGACA |
| 436 | 9 | GGAGGAGCUACGAUGCGGCCGAUUUCGUCAUCCUCCAUACCAUC GUC UUACCGUUCCGCGUCAGACGACUCGCUGAGGAUCCGACA |
| 19 | 10 | GGAGGAGCUACGAUGCGGCCGAUUUCGUCAUCCUCCAUACCAUC GC CUUACCGCUCCGCGUCAGACGACUCGCUGAGGAUCCGACA |
| 665 | 11 | GGAGGAGCUACGAUGCGGCCGAUUUCGUCAUCCUCCAUGCCAUC GCC UUACCGUUCCGCGUCAGACGACUCGCUGAGGAUCCGACA |
| 280 | 12 | GGAGGAGCUACGAUGCGGCCGAUUUCGUCAUCCUCCAUACCAUC GCCCUACCGUUCCGCGUCAGACGACUCGCUGAGGAUCCGACA |
| 79 | 13 | GGAGGAGCUACGAUGCGGCCGAUUUCGUCAUCCUCCAUACCAUC GCCUUGCCGUUCCGCGUCAGACGACUCGCUGAGGAUCCGACA |
| 278 | 14 | GGAGGAGCUACGAUGCGGCCGAUUUCGUCAUCCUCCAUACCAUC GCCUUACCAUUCCGCGUCAGACGACUCGCUGAGGAUCCGACA |
| 658 | 15 | GGAGGAGCUACGAUGCGGCCGAUUUCGUCAUCCCCCAUACCAUC GCCUUACCGUUCCGCGUCAGACGACUCGCUGAGGAUCCGACA |
| 37 | 16 | GGAGGAGCUACGAUGCGGCCGAUAUCGUCAUCCUCCAUACCAUC GCCUUACCGUUCCGCGUCAGACGACUCGCUGAGGAUCCGACA |
| 485 | 17 | GGAGGAGCUACGAUGCGGCCGAUUUCGUCAUCCUCCAUACCAUC GCCUACCGUUCCGCGUCAGACGACUCGCUGAGGAUCCGACA |
| 2617 | 18 | GGAGGAGCUACGAUGCGGUGUACACUGAUUGCCUUUGUGUUAUG AGCGACAGAUCUGCCAGACAGACGACUCGCUGAGGAUCCGACA |
| 2273 | 19 | GGAGGAGCUACGAUGCGGACCUUGUUUUCCUCUGUACCCCACUU CCCCAUUUCUCCCUGCUCAGACGACUCGCUGAGGAUCCGACA |
| 146 | 20 | GGAGGAGCUACGAUGCGGCCGAUCUCGUCAUCCUCCAUACCAUC GCCUUACCGUUCCGCGUCAGACGACUCGCUGAGGAUCCGACA |
| 657 | 21 | GGAGGAGCUACGAUGCGGCCGAUUUCGUCAUCCUCCAUACCAUC GCCUUACCGUCCCGCGUCAGACGACUCGCUGAGGAUCCGACA |
| 141 | 22 | GGAGGAGCUACGAUGCGGCCGAUUUCGUCAUCCUCCAUACCGUC GCCUUACCGUUCCGCGUCAGACGACUCGCUGAGGAUCCGACA |
| 2048 | 23 | GGAGGAGCUACGAUGCGGCCGAUUUCGUCGUCCUCCAUACCAUC GCCUUACCGUUCCGCGUCAGACGACUCGCUGAGGAUCCGACA |
| 901 | 24 | GGAGGAGCUACGAUGCGGGGAAGCAACACUUAGUCGCGAUUGAU ACGUGCGCAGUCAUCAGACAGACGACUCGCUGAGGAUCCGACA |
| 268 | 25 | GGAGGAGCUACGAUGCGGCCGAUUUCGCCAUCCUCCAUACCAUC GCCUUACCGUUCCGCGUCAGACGACUCGCUGAGGAUCCGACA |
| 683 | 26 | GGAGGAGCUACGAUGCGGCCGAUUUCGUCAUCCUCCAUACCAUC GCCUUCCGUUCCGCGUCAGACGACUCGCUGAGGAUCCGACA |
| 655 | 27 | GGAGGAGCUACGAUGCGGCCGAUUUCGUCAUCCUCCAUAUCAUC GCCUUACCGUUCCGCGUCAGACGACUCGCUGAGGAUCCGACA |
| 1427 | 28 | GGAGGAGCUACGAUGCGGCCGAUUUCGUCACCCUCCAUACCAUC GCCUUACCGUUCCGCGUCAGACGACUCGCUGAGGAUCCGACA |
| 457 | 29 | GGAGGAGCUACGAUGCGGCCGACUUCGUCAUCCUCCAUACCAUC GCCUUACCGUUCCGCGUCAGACGACUCGCUGAGGAUCCGACA |
| 1141 | 30 | GGAGGAGCUACGAUGCGGCCGAUUUCGUCAUCCUCCAUACCAUC GCCUUACCUUCCGCGUCAGACGACUCGCUGAGGAUCCGACA |
| 149 | 31 | GGAGGAGCUACGAUGCGGCCGAUUUCGUCAUCCUCCAUACCAUC GCCUUACCGUUCCGCAGUCAGACGACUCGCUGAGGAUCCGACA |
| 1759 | 32 | GGAGGAGCUACGAUGCGGCCGAUUUCGUCAUCCUCCUUACCAUC GCCUUACCGUUCCGCGUCAGACGACUCGCUGAGGAUCCGACA |
| 264 | 33 | GGAGGAGCUACGAUGCGGCCGAUUUCGUCAUCCUUCAUACCAUC GCCUUACCGUUCCGCGUCAGACGACUCGCUGAGGAUCCGACA |
| 259 | 34 | GGAGGAGCUACGAUGCGGCCGAUUUCGUCAUCCUCCAUACUAUC GCCUUACCGUUCCGCGUCAGACGACUCGCUGAGGAUCCGACA |
| 1130 | 35 | GGAGGAGCUACGAUGCGGCCGAUUUCAUCAUCCUCCAUACCAUC GCCUUACCGUUCCGCGUCAGACGACUCGCUGAGGAUCCGACA |
| 453 | 36 | GGAGGAGCUACGAUGCGGCCGAUUUCGUCAUCCUCCAUACCAUC GCCUUACCUUUCCGCGUCAGACGACUCGCUGAGGAUCCGACA |
| 1133 | 37 | GGAGGAGCUACGAUGCGGCCGAUUUCGUCAUCCUCUAUACCAUC GCCUUACCGUUCCGCGUCAGACGACUCGCUGAGGAUCCGACA |
| 883 | 38 | GGAGGAGCUACGAUGCGGCCGAUUUCGUCAUCCUCCAAACCAUC GCCUUACCGUUCCGCGUCAGACGACUCGCUGAGGAUCCGACA |
| 155 | 39 | GGAGGAGCUACGAUGCGGCCGAUUUCGUCAUCCUCCAUACCAUC GCCUUAUCGUUCCGCGUCAGACGACUCGCUGAGGAUCCGACA |
| 75 | 40 | GGAGGAGCUACGAUGCGGCCGAUUCCGUCAUCCUCCAUACCAUC GCCUUACCGUUCCGCGUCAGACGACUCGCUGAGGAUCCGACA |
| 2049 | 41 | GGAGGAGCUACGAUGCGGCUGAUUUCGUCAUCCUCCAUACCAUC GCCUUACCGUUCCGCGUCAGACGACUCGCUGAGGAUCCGACA |
| 1103 | 42 | GGAGGAGCUACGAUGCGGCCGAUUUUCGUCAUCCUCCAUACCAU CGCCUUACCGUUCCGCGUCAGACGACUCGCUGAGGAUCCGACA |
| 885 | 43 | GGAGGAGCUACGAUGCGGCCGAUUUCGUCAUCCUCAAUACCAUC GCCUUACCGUUCCGCGUCAGACGACUCGCUGAGGAUCCGACA |
| 281 | 44 | GGAGGAGCUACGAUGCGGCCGAUUUCGUCAUCCUCCAUACCAUC GCCUUCCCGUUCCGCGUCAGACGACUCGCUGAGGAUCCGACA |
| 2381 | 45 | GGAGGAGCUACGAUGCGGAUUACCAACUUGAACGCCGAGAGUGU GGUCACGUGUUCUGCAGACAGACGACUCGCUGAGGAUCCGACA |
| 879 | 46 | GGAGGAGCUACGAUGCGGCCGAUUUCGUCAUCCUCCAUACCAUC GCCUUACCGUUUCGCGUCAGACGACUCGCUGAGGAUCCGACA |
| 292 | 47 | GGAGGAGCUACGAUGCGGCCGAUUUCGUAUCCUCCAUACCAUCG CCUUACCGUUCCGCGUCAGACGACUCGCUGAGGAUCCGACA |
| 1511 | 48 | GGAGGAGCUACGAUGCGGUUAUGCGUUUAAGUCAUUGACGCGUU ACACUGGAGGGGGCCAGACAGACGACUCGCUGAGGAUCCGACA |
| 148 | 49 | GGAGGAGCUACGAUGCGGCCGAUUUCGUCAUCCUCCAUACCAUC GCCUUACCGUUCCGCAUCAGACGACUCGCUGAGGAUCCGACA |
| 878 | 50 | GGAGGAGCUACGAUGCGGCCGAUUUCGUCAUCCUCCAUAACAUC GCCUUACCGUUCCGCGUCAGACGACUCGCUGAGGAUCCGACA |
| 156 | 51 | GGAGGAGCUACGAUGCGGCCGAUUUCGUCAUCCUCCUACCAUCG CCUUACCGUUCCGCGUCAGACGACUCGCUGAGGAUCCGACA |
| 266 | 52 | GGAGGAGCUACGAUGCGGCCGAUUUCGUUAUCCUCCAUACCAUC GCCUUACCGUUCCGCGUCAGACGACUCGCUGAGGAUCCGACA |
| 459 | 53 | GGAGGAGCUACGAUGCGGCCGAUUUCGUCAUCCUCCAUACCAUC GCCAUACCGUUCCGCGUCAGACGACUCGCUGAGGAUCCGACA |
| 668 | 54 | GGAGGAGCUACGAUGCGGCCGAUUUCGUCAUCCUCCAUACCAUC GCCUAACCGUUCCGCGUCAGACGACUCGCUGAGGAUCCGACA |
| 1760 | 55 | GGAGGAGCUACGAUGCGGCCGAUUUCGUCAUCCUCCAUACCAUC GCUUUACCGUUCCGCGUCAGACGACUCGCUGAGGAUCCGACA |
| 661 | 56 | GGAGGAGCUACGAUGCGGCCGAUUUCGUCAUCCUCCAUACCAUU GCCUUACCGUUCCGCGUCAGACGACUCGCUGAGGAUCCGACA |
| 1129 | 57 | GGAGGAGCUACGAUGCGGCCGAUUUCGUCAUACUCCAUACCAUC GCCUUACCGUUCCGCGUCAGACGACUCGCUGAGGAUCCGACA |
| 438 | 58 | GGAGGAGCUACGAUGCGGCCGAUUUCGUCAUCCUCCAUAGCAUC GCCUUACCGUUCCGCGUCAGACGACUCGCUGAGGAUCCGACA |
| 277 | 59 | GGAGGAGCUACGAUGCGGCCGAUUUCGUCAUCCUCCAUACCAUC GCCUUACCCUUCCGCGUCAGACGACUCGCUGAGGAUCCGACA |
| 18 | 60 | GGAGGAGCUACGAUGCGGCCGAUUUCGUAAUCCUCCAUACCAUC GCCUUACCGUUCCGCGUCAGACGACUCGCUGAGGAUCCGACA |
| 152 | 61 | GGAGGAGCUACGAUGCGGCCGAUUUCGUCAUCCUCCAUACCAUC ACCUUACCGUUCCGCGUCAGACGACUCGCUGAGGAUCCGACA |
| 460 | 62 | GGAGGAGCUACGAUGCGGCCGAUUUCGUCAUCCUCCAUACCAUC GCCUUUCCGUUCCGCGUCAGACGACUCGCUGAGGAUCCGACA |
| 1370 | 63 | GGAGGAGCUACGAUGCGGCCCAUCCCUCCCGCGUAUUGCGAACG CAUCGUUAUUUAGCCGUCAGACGACUCGCUGAGGAUCCGACA |
| 717 | 64 | GGAGGAGCUACGAUGCGGUAAUUCUCAGGAGGUGCGGAACGGGA UAUGGAUUGUUCGCCAGACAGACGACUCGCUGAGGAUCCGACA |
| 456 | 65 | GGAGGAGCUACGAUGCGGCCGAUUUCGUCAUCCUCCAUCCCAUC GCCUUACCGUUCCGCGUCAGACGACUCGCUGAGGAUCCGACA |
| 876 | 66 | GGAGGAGCUACGAUGCGGCCGAUUUCGUCAUCAUCCAUACCAUC GCCUUACCGUUCCGCGUCAGACGACUCGCUGAGGAUCCGACA |
| 391 | 67 | GGAGGAGCUACGAUGCGGUGAAUUCUUCCGGCACUUUGUCAUCU UCACUCCCAUGCUGCACAGACGACUCGCUGAGGAUCCGACA |
| 659 | 68 | GGAGGAGCUACGAUGCGGCCGAUUUCGUCAUCCUACAUACCAUC GCCUUACCGUUCCGCGUCAGACGACUCGCUGAGGAUCCGACA |
| 437 | 69 | GGAGGAGCUACGAUGCGGCCGAUUUCGUCAUCCUCCAUACCAUC CCCUUACCGUUCCGCGUCAGACGACUCGCUGAGGAUCCGACA |
| 143 | 70 | GGAGGAGCUACGAUGCGGCCGAUUUCGUCAUCCACCAUACCAUC GCCUUACCGUUCCGCGUCAGACGACUCGCUGAGGAUCCGACA |
| 802 | 71 | GGAGGAGCUACGAUGCGGCCGUCUCGCUCUCAUCCCGUGCACGA AACCUCUCUCACUGCACAGACGACUCGCUGAGGAUCCGACA |
| 2192 | 72 | GGAGGAGCUACGAUGCGGCAACAAACUAAUCAGACACGAGACAGA GAGAUAGAUCUGCCAGACAGACGACUCGCUGAGGAUCCGACA |
| 1736 | 73 | GGAGGAGCUACGAUGCGGUGAAUUCUUCCGGCACUUUGUCAUCU UCACCCCCCUGCUGCACAGACGACUCGCUGAGGAUCCGACA |
| 462 | 74 | GGAGGAGCUACGAUGCGGCCGAUUUCGUCAUCCUCCAUACCAUC GCCUUAGCGUUCCGCGUCAGACGACUCGCUGAGGAUCCGACA |
| 882 | 75 | GGAGGAGCUACGAUGCGGCCGAUUUCGUCAUCCUCCAUACCAUA GCCUUACCGUUCCGCGUCAGACGACUCGCUGAGGAUCCGACA |
| 140 | 76 | GGAGGAGCUACGAUGCGGCCGAUUUCGUCAUCCUCCAUACAAUC GCCUUACCGUUCCGCGUCAGACGACUCGCUGAGGAUCCGACA |
| 363 | 77 | GGAGGAGCUACGAUGCGGCCCAUCACUCCCGCGUACUGCGAACG CAUCGUUAUUUAGCCGUCAGACGACUCGCUGAGGAUCCGACA |
| 275 | 78 | GGAGGAGCUACGAUGCGGCCGAUUUCGUCAUCCUCCAUACCAUC GCCUUACCGAUCCGCGUCAGACGACUCGCUGAGGAUCCGACA |
| 667 | 79 | GGAGGAGCUACGAUGCGGCCGAAUUCGUCAUCCUCCAUACCAUC GCCUUACCGUUCCGCGUCAGACGACUCGCUGAGGAUCCGACA |
| 36 | 80 | GGAGGAGCUACGAUGCGGCCGAUUUCGUCAUCCUCCAUACCAUC GACUUACCGUUCCGCGUCAGACGACUCGCUGAGGAUCCGACA |
| 441 | 81 | GGAGGAGCUACGAUGCGGCCGAUUUCGUCAUCCUGCAUACCAUC GCCUUACCGUUCCGCGUCAGACGACUCGCUGAGGAUCCGACA |
| 1383 | 82 | GGAGGAGCUACGAUGCGGUCCUUGUUUUCCUCUGUACCCCACUU CCCCAUUUCUCCCUGCUCAGACGACUCGCUGAGGAUCCGACA |
| 1429 | 83 | GGAGGAGCUACGAUGCGGCCGAUUUCUUCAUCCUCCAUACCAUC GCCUUACCGUUCCGCGUCAGACGACUCGCUGAGGAUCCGACA |
| 262 | 84 | GGAGGAGCUACGAUGCGGCCGAUUUCGUCAUCCUCCAUACCAUC UCCUUACCGUUCCGCGUCAGACGACUCGCUGAGGAUCCGACA |
| 451 | 85 | GGAGGAGCUACGAUGCGGCCGAUUUCGUCAUCCUCCAUACCAUG GCCUUACCGUUCCGCGUCAGACGACUCGCUGAGGAUCCGACA |
| 446 | 86 | GGAGGAGCUACGAUGCGGCCGAUUUCGGCAUCCUCCAUACCAUC GCCUUACCGUUCCGCGUCAGACGACUCGCUGAGGAUCCGACA |
| 265 | 87 | GGAGGAGCUACGAUGCGGCCGAUUUCGUGAUCCUCCAUACCAUC GCCUUACCGUUCCGCGUCAGACGACUCGCUGAGGAUCCGACA |
| 880 | 88 | GGAGGAGCUACGAUGCGGCCGAUUUCGUCAUCCUCCAUACCAUC GCCUUACCGUACCGCGUCAGACGACUCGCUGAGGAUCCGACA |
| 323 | 89 | GGAGGAGCUACGAUGCGGACGGAGGAUAGUUGCUAAUCGAGCCC UGCCGACGCUUCAGACAGACGACUCGCUGAGGAUCCGACA |
| 458 | 90 | GGAGGAGCUACGAUGCGGCCGAUUUCGUCAUCCUCCGUACCAUC GCCUCACCGUUCCGCGUCAGACGACUCGCUGAGGAUCCGACA |
| 662 | 91 | GGAGGAGCUACGAUGCGGCCGAUUUCGUCAUCCUCCAUACCAUC GCCUUACAGUUCCGCGUCAGACGACUCGCUGAGGAUCCGACA |
| 682 | 92 | GGAGGAGCUACGAUGCGGCCGAUUUCGUCAUCCUCCAUACCAUC CCUUACCGUUCCGCGUCAGACGACUCGCUGAGGAUCCGACA |
| 154 | 93 | GGAGGAGCUACGAUGCGGCCGAUUUCGUCAUCCUCCAUACCAUC GCCUGACCGUUCCGCGUCAGACGACUCGCUGAGGAUCCGACA |
| 282 | 94 | GGAGGAGCUACGAUGCGGCCGAUUUCGUCAUCCUCCAUACCAUC GCCUUAACGUUCCGCGUCAGACGACUCGCUGAGGAUCCGACA |
| 449 | 95 | GGAGGAGCUACGAUGCGGCCGAUUUCGUCAUCCUCCAUACCAUC GCCUUACCGGUCCGCGUCAGACGACUCGCUGAGGAUCCGACA |
| 16 | 96 | GGAGGAGCUACGAUGCGGCCGAUUCGUCAUCCUCCAUACCAUCG CCUUACCGUUCCGCGUCAGACGACUCGCUGAGGAUCCGACA |
| 900 | 97 | GGAGGAGCUACGAUGCGGCCGAUUUCGUCAUCCUCCAUACCAUC GCCUUACCGUCCGCGUCAGACGACUCGCUGAGGAUCCGACA |
| 2032 | 98 | GGAGGAGCUACGAUGCGGUGAAUUCUUCCGGCACUUUGUCAUCU UCACCCCCAUGCUGCGCAGACGACUCGCUGAGGAUCCGACA |
| 267 | 99 | GGAGGAGCUACGAUGCGGCCGAUUUCGUCAUCCUCCAUACCAAC GCCUUACCGUUCCGCGUCAGACGACUCGCUGAGGAUCCGACA |
| 72 | 100 | GGAGGAGCUACGAUGCGGCCGAUUUCGUCAUCCUCCAUACCCUC GCCUUACCGUUCCGCGUCAGACGACUCGCUGAGGAUCCGACA |
| 1075 | 101 | GGAGGAGCUACGAUGCGGUGAAUUCUUCCGGCACUUUGUCAUCU UCACCUCCAUGCUGCACAGACGACUCGCUGAGGAUCCGACA |
| 261 | 102 | GGAGGAGCUACGAUGCGGCCGAUUUCGUCAUCCUCCAUACCAUC GGCUUACCGUUCCGCGUCAGACGACUCGCUGAGGAUCCGACA |
| 801 | 103 | GGAGGAGCUACGAUGCGGCCGUCUCGCUCUCAUCCCAUGCACGA AACCUCUCUCGCUGCACAGACGACUCGCUGAGGAUCCGACA |
| 291 | 104 | GGAGGAGCUACGAUGCGGCCGAUUUGUCAUCCUCCAUACCAUCG CCUUACCGUUCCGCGUCAGACGACUCGCUGAGGAUCCGACA |
| 599 | 105 | GGAGGAGCUACGAUGCGGUGAAUUCUUCCGGCACUUUGUCAUCU UCACCCCCACGCUGCACAGACGACUCGCUGAGGAUCCGACA |
| 272 | 106 | GGAGGAGCUACGAUGCGGCCGAUUACGUCAUCCUCCAUACCAUC GCCUUACCGUUCCGCGUCAGACGACUCGCUGAGGAUCCGACA |
| 447 | 107 | GGAGGAGCUACGAUGCGGCCGAUUUCGCCAUCCUCCAUACCAUC GCCUCACCGUUCCGCGUCAGACGACUCGCUGAGGAUCCGACA |
| 74 | 108 | GGAGGAGCUACGAUGCGGCCGAUUUCGACAUCCUCCAUACCAUC GCCUUACCGUUCCGCGUCAGACGACUCGCUGAGGAUCCGACA |
| 674 | 109 | GGAGGAGCUACGAUGCGGCCGAUUUCGUCAUCCUCCAUACAUCG CCUUACCGUUCCGCGUCAGACGACUCGCUGAGGAUCCGACA |
| 4 | 110 | GGAGGAGCUACGAUGCGGCCGAUUUCGUCAUCCUCCAUACGAUC GCCUUACCGUUCCGCGUCAGACGACUCGCUGAGGAUCCGACA |
| 455 | 111 | GGAGGAGCUACGAUGCGGCCGAUUUCGUCAUCCUCCGUACCAUC GCCUUACCAUUCCGCGUCAGACGACUCGCUGAGGAUCCGACA |
| 890 | 112 | GGAGGAGCUACGAUGCGGCCGAUUUCGUCAUCCCCAUACCAUCG CCUUACCGUUCCGCGUCAGACGACUCGCUGAGGAUCCGACA |
| 260 | 113 | GGAGGAGCUACGAUGCGGCCGAUUUCGUCAUCCUCCAUACCUUC GCCUUACCGUUCCGCGUCAGACGACUCGCUGAGGAUCCGACA |
| 39 | 114 | GGAGGAGCUACGAUGCGGCCGAUUUCGUCAUGCUCCAUACCAUC GCCUUACCGUUCCGCGUCAGACGACUCGCUGAGGAUCCGACA |
| 57 | 115 | GGAGGAGCUACGAUGCGGCCCAUCACUCCCGCGCAUUGCGAACG CAUCGUUAUUUAGCCGUCAGACGACUCGCUGAGGAUCCGACA |
| 889 | 116 | GGAGGAGCUACGAUGCGGCCGAUUUCGUCAUCUCCAUACCAUCG CCUUACCGUUCCGCGUCAGACGACUCGCUGAGGAUCCGACA |
| 828 | 117 | GGAGGAGCUACGAUGCGGUGAAUUCUUCCGGCACUUUGUCAUCU UCACCCCCAUGCCGCACAGACGACUCGCUGAGGAUCCGACA |
| 2016 | 118 | GGAGGAGCUACGAUGCGGCCCAUCACUCCCGCGUAUUGCGAACG CCUCGUUAUUUAGCCGUCAGACGACUCGCUGAGGAUCCGACA |
| 666 | 119 | GGAGGAGCUACGAUGCGGUCGAUUUCGUCAUCCUCCGUACCAUC GCCUUACCGUUCCGCGUCAGACGACUCGCUGAGGAUCCGACA |
| 1738 | 120 | GGAGGAGCUACGAUGCGGUGAAUUCUUCCGGCACUUUGUCAUCU UCAUCCCCAUGCUGCACAGACGACUCGCUGAGGAUCCGACA |
| 656 | 121 | GGAGGAGCUACGAUGCGGCCGAUUUCGUCAUCCUCCAUACCAUC GCCUUACCGUUACGCGUCAGACGACUCGCUGAGGAUCCGACA |
| 654 | 122 | GGAGGAGCUACGAUGCGGCCGAUUUCGUCAACCUCCAUACCAUC GCCUUACCGUUCCGCGUCAGACGACUCGCUGAGGAUCCGACA |
| 440 | 123 | GGAGGAGCUACGAUGCGGCCGAUUUCGUCAUCCGCCAUACCAUC GCCUUACCGUUCCGCGUCAGACGACUCGCUGAGGAUCCGACA |
| 370 | 124 | GGAGGAGCUACGAUGCGGCCGUCUCGCUCUCAUCCCAUGCACGA AACCUCUCUCCCUGCACAGACGACUCGCUGAGGAUCCGACA |
| 881 | 125 | GGAGGAGCUACGAUGCGGCCGAUUUCGUCAUCCUCCACACCAUC GCCUUACCGCUCCGCGUCAGACGACUCGCUGAGGAUCCGACA |
| 150 | 126 | GGAGGAGCUACGAUGCGGCCGAUUUCGUCAUCCUCCAUACCAUC GCCUUACCGUUCCGCUUCAGACGACUCGCUGAGGAUCCGACA |
| 73 | 127 | GGAGGAGCUACGAUGCGGCCGAUUUCGUCAUCGUCCAUACCAUC GCCUUACCGUUCCGCGUCAGACGACUCGCUGAGGAUCCGACA |
| 670 | 128 | GGAGGAGCUACGAUGCGGCCGAUUUCGUCAUCCUCCAUACCAUC GCCGUACCGUUCCGCGUCAGACGACUCGCUGAGGAUCCGACA |
| 263 | 129 | GGAGGAGCUACGAUGCGGCCGAUUUCGUCAUCCUCCAUACCAUC GCCUUACCGUUGCGCGUCAGACGACUCGCUGAGGAUCCGACA |
| 270 | 130 | GGAGGAGCUACGAUGCGGCCGAUGUCGUCAUCCUCCAUACCAUC GCCUUACCGUUCCGCGUCAGACGACUCGCUGAGGAUCCGACA |
| 1137 | 131 | GGAGGAGCUACGAUGCGGCCGAUAUCGUCAUCCUCCAUACCAUC GCCUUCCGUUCCGCGUCAGACGACUCGCUGAGGAUCCGACA |
| 238 | 132 | GGAGGAGCUACGAUGCGGCCGAUUUCGUCAUCCUCCAUACCAUC GCCUUACCGUUCGCGUCAGACGACUCGCUGAGGAUCCGACA |
| 603 | 133 | GGAGGAGCUACGAUGCGGUGAAUUCUUCCGGCACUUUGUCAUCU UCACCCCAUGCUGCACAGACGACUCGCUGAGGAUCCGACA |
| 827 | 134 | GGAGGAGCUACGAUGCGGUGAAUUCUUCCGGCACUUUGUCAUCU UCGCCCCCAUGCUGCACAGACGACUCGCUGAGGAUCCGACA |
| 1192 | 135 | GGAGGAGCUACGAUGCGGCAGGUGCGGGAUCUAAUGCGUAGACA GCCAUAUACUGACACAGACAGACGACUCGCUGAGGAUCCGACA |
| 117 | 136 | GGAGGAGCUACGAUGCGGCCGUCUCGCUCUCAUCCCAUGCACGA ACCCUCUCUCACUGCACAGACGACUCGCUGAGGAUCCGACA |
| 448 | 137 | GGAGGAGCUACGAUGCGGCCGAUUGCGUCAUCCUCCAUACCAUC GCCUUACCGUUCCGCGUCAGACGACUCGCUGAGGAUCCGACA |
| 1739 | 138 | GGAGGAGCUACGAUGCGGUGAAUUCUUCCGGCACUUUGUCAUCU UCACCCCCAUGCUGCUCAGACGACUCGCUGAGGAUCCGACA |
| 576 | 139 | GGAGGAGCUACGAUGCGGCCGUCUCGCUCUCAUCCCAUGCACGA AACCUCUCUCACUGCGCAGACGACUCGCUGAGGAUCCGACA |
| 185 | 140 | GGAGGAGCUACGAUGCGGACGGAAGGAUAGUUGCUAAUCGAGCC CUGCCGACGCUUCAGACAGACGACUCGCUGAGGAUCCGACA |
| 2131 | 141 | GGAGGAGCUACGAUGCGGCAAAAACUGAUAAACACAGGUCCGGCA UUUGAGCGUACACCCAGACAGACGACUCGCUGAGGAUCCGACA |
| 823 | 142 | GGAGGAGCUACGAUGCGGUGAAUUCUUCCGGCACUUUGUCAUCU UCACCCCCGUGCUGCACAGACGACUCGCUGAGGAUCCGACA |
| 40 | 143 | GGAGGAGCUACGAUGCGGCCGAUUUCGUCAUCCUCCAUACCUCG CCUUACCGUUCCGCGUCAGACGACUCGCUGAGGAUCCGACA |
| 38 | 144 | GGAGGAGCUACGAUGCGGCCGAUUUCGUCAUCCUCCAUACCAUC GCCUUACCGUUCCGCCUCAGACGACUCGCUGAGGAUCCGACA |
| 560 | 145 | GGAGGAGCUACGAUGCGGCCCAUCACUCCCGCGUGUUGCGAACG CAUCGUUAUUUAGCCGUCAGACGACUCGCUGAGGAUCCGACA |
| 1183 | 146 | GGAGGAGCUACGAUGCGGCUUCCCUAUUCCAAAGGAGGUGCGGU ACGUUUUGUUACGCCAGACAGACGACUCGCUGAGGAUCCGACA |
| 435 | 147 | GGAGGAGCUACGAUGCGGCCGAUUUCGUCAUCCUCCAUACUAUC GCCCUACCGUUCCGCGUCAGACGACUCGCUGAGGAUCCGACA |
| 273 | 148 | GGAGGAGCUACGAUGCGGCCGAUUUCGUCAUCCUCCACACCAUC GCCUUACCGUUCCGCAUCAGACGACUCGCUGAGGAUCCGACA |
| 439 | 149 | GGAGGAGCUACGAUGCGGCCGAUUUCGUCAUCCUCCAUACCAUC GCCUUACCGUGCCGCGUCAGACGACUCGCUGAGGAUCCGACA |
| 1082 | 150 | GGAGGAGCUACGAUGCGGUGAAUUCUUCCGGCACCUUGUCAUCU UCACCCCCAUGCUGCACAGACGACUCGCUGAGGAUCCGACA |
| 321 | 151 | GGAGGAGCUACGAUGCGGUGUACCCUGAUUGCCUUUGUGUUAUG AGCGACAGAUCUGCCAGACAGACGACUCGCUGAGGAUCCGACA |
| 562 | 152 | GGAGGAGCUACGAUGCGGCCCACCACUCCCGCGUAUUGCGAACG CAUCGUUAUUUAGCCGUCAGACGACUCGCUGAGGAUCCGACA |
| 1735 | 153 | GGAGGAGCUACGAUGCGGUGAAUUCUUCCGGCACUUUGUCGUCU UCACCCCCAUGCUGCACAGACGACUCGCUGAGGAUCCGACA |
| 106 | 154 | GGAGGAGCUACGAUGCGGUACACUCAGUCACGUAGCACCGCAGU GACCCUUUGUACCGCAGACAGACGACUCGCUGAGGAUCCGACA |
| 1487 | 155 | GGAGGAGCUACGAUGCGGCCAGCCACACUUUGACCGAAUUGGCA AGCGCGGGCAAAUCGAACAGACGACUCGCUGAGGAUCCGACA |
| 581 | 156 | GGAGGAGCUACGAUGCGGCCGUCUCGCUCUCAUCCCAUGCACGA CACCUCUCUCACUGCACAGACGACUCGCUGAGGAUCCGACA |
| 1063 | 157 | GGAGGAGCUACGAUGCGGUCGUCUCGCUCUCAUCCCAUGCACGA AACCUCUCUCACUGCACAGACGACUCGCUGAGGAUCCGACA |
| 480 | 158 | GGAGGAGCUACGAUGCGGCCGAUUUCGUCAUCCUCCAUACCAUG CCUUACCGUUCCGCGUCAGACGACUCGCUGAGGAUCCGACA |
| 1061 | 159 | GGAGGAGCUACGAUGCGGCCGUCUCGCUCUCCUCCCAUGCACGA AACCUCUCUCACUGCACAGACGACUCGCUGAGGAUCCGACA |
| 1479 | 160 | GGAGGAGCUACGAUGCGGGCUGUGCCGGCCCUGCUCUGGUCGC CAUUGUCAGUCUGUGCAGACAGACGACUCGCUGAGGAUCCGACA |
| 1392 | 161 | GGAGGAGCUACGAUGCGGUGAAUUCUCCCGGCACUUUGUCAUCU UCACCCCCAUGCUGCACAGACGACUCGCUGAGGAUCCGACA |
| 225 | 162 | GGAGGAGCUACGAUGCGGACCUUGUUUUUCCUCUGUACCCCACU UCCCCAUUUCUCCCUGCUCAGACGACUCGCUGAGGAUCCGACA |
| 1856 | 163 | GGAGGAGCUACGAUGCGGAUUAUUGUUUGACGUAUUCCAAGUGA GAUUACGCACGCACCAGACAGACGACUCGCUGAGGAUCCGACA |
| 269 | 164 | GGAGGAGCUACGAUGCGGCCGAUAUCGUCAUCCUCCAUACCAUC GCCUUACCGUCCCGCGUCAGACGACUCGCUGAGGAUCCGACA |
| 829 | 165 | GGAGGAGCUACGAUGCGGUGAAUUCUUCCGGCACUUUGUCAUCU UCCCCCCAUGCUGCACAGACGACUCGCUGAGGAUCCGACA |
| 800 | 166 | GGAGGAGCUACGAUGCGGCCGUCUCGCUCUUAUCCCAUGCACGA AACCUCUCUCACUGCACAGACGACUCGCUGAGGAUCCGACA |
| 389 | 167 | GGAGGAGCUACGAUGCGGUGAAUUCUUCCGGCACUUUGUCAUCU UCACCCUCAUGCUGCACAGACGACUCGCUGAGGAUCCGACA |
| 28 | 168 | GGAGGAGCUACGAUGCGGCCCAUCACUCCCGCGUAUUGCGAACG CAUCGUUGUUUAGCCGUCAGACGACUCGCUGAGGAUCCGACA |
| 1737 | 169 | GGAGGAGCUACGAUGCGGUGAAUUCUUCCGGCACUUUGUCAUCC UCACCCCCAUGCUGCACAGACGACUCGCUGAGGAUCCGACA |
| 1052 | 170 | GGAGGAGCUACGAUGCGGCCCAUCACUCCCACGUAUUGCGAACG CAUCGUUAUUUAGCCGUCAGACGACUCGCUGAGGAUCCGACA |
| 405 | 171 | GGAGGAGCUACGAUGCGGCCGAUUUCGUCAUCCUCCAUACCAUC GCCUUACCGUUUCCGCGUCAGACGACUCGCUGAGGAUCCGACA |
| 317 | 172 | GGAGGAGCUACGAUGCGGGGAAGCAACACUUAGUCGGGAUUGAU ACGUGCCCAGUCAGCAGUCAGACGACUCGCUGAGGAUCCGACA |
| 1716 | 173 | GGAGGAGCUACGAUGCGGCCGAUCACUCCCGCGUAUUGCGAACG CAUCGUUAUUUAGCCGUCAGACGACUCGCUGAGGAUCCGACA |
| 623 | 174 | GGAGGAGCUACGAUGCGGCCGAAUUUCGUCAUCCUCCAUACCAU CGCCUUACCGUUCCGCGUCAGACGACUCGCUGAGGAUCCGACA |
| 305 | 175 | GGAGGAGCUACGAUGCGGCCGAUUUCGUCAUCCUCCAUACCAUC GCUUACCGUUCCGCGUCAGACGACUCGCUGAGGAUCCGACA |
| 686 | 176 | GGAGGAGCUACGAUGCGGCCGAUUUCGUCAUCCUCCAUACCAUC GCCCACCGUUCCGCGUCAGACGACUCGCUGAGGAUCCGACA |
| 151 | 177 | GGAGGAGCUACGAUGCGGCCGAUUUCGUCAUCCUCCAUACCAUC GCCUUACCGUUCCGUCAGACGACUCGCUGAGGAUCCGACA |
| 178 | 178 | GGAGGAGCUACGAUGCGGGGAAGCACCACUUAGUCGCGAUUGAU ACGUGCGCAGUCAUCAGACAGACGACUCGCUGAGGAUCCGACA |
| 1085 | 179 | GGAGGAGCUACGAUGCGGUGAAUUCUUCCGGCACUUUGUCAUCU UCACGCCCAUGCUGCACAGACGACUCGCUGAGGAUCCGACA |
| 1428 | 180 | GGAGGAGCUACGAUGCGGCCGAUUUCGUCAUCCUCCAAGCCAUC GCCUUACCGUUCCGCGUCAGACGACUCGCUGAGGAUCCGACA |
| 1401 | 181 | GGAGGAGCUACGAUGCGGUGAAUUCUUCCGACACUUUGUCAUCU UCACCCCCAUGCUGCACAGACGACUCGCUGAGGAUCCGACA |
| 1 | 182 | GGAGGAGCUACGAUGCGGGGAAGCCACACUUAGUCGCGAUUGAU ACGUGCGCAGUCAUCAGACAGACGACUCGCUGAGGAUCCGACA |
| 799 | 183 | GGAGGAGCUACGAUGCGGCCGUCUCGUUCUCAUCCCAUGCACGA AACCUCUCUCACUGCACAGACGACUCGCUGAGGAUCCGACA |
| 98 | 184 | GGAGGAGCUACGAUGCGGACGGAGGAUAGUUGCUAAUCGAGCCC UGCCGACGCUUCAGUCAGACGACUCGCUGAGGAUCCGACA |
| 550 | 185 | GGAGGAGCUACGAUGCGGACGGUUUCACCUCUAGGAGCACUGAA AGCCAACCUUCGCGCACAGACGACUCGCUGAGGAUCCGACA |
| 2279 | 186 | GGAGGAGCUACGAUGCGGUGAAUUCCUCCGGCACUUUGUCAUCU UCACCCCCAUGCUGCACAGACGACUCGCUGAGGAUCCGACA |
| 2047 | 187 | GGAGGAGCUACGAUGCGGCCGAUUUCGUCAUCCUCCACAUCAUC GCCUUACCGUUCCGCGUCAGACGACUCGCUGAGGAUCCGACA |
| 490 | 188 | GGAGGAGCUACGAUGCGGCCGAUUUCGUCAUCCCCCAUACCAUC GCCUUACCUUCCGCGUCAGACGACUCGCUGAGGAUCCGACA |
| 606 | 189 | GGAGGAGCUACGAUGCGGUGAAUUCUUCCGGCACUUGUCAUCUU CACCCCCAUGCUGCACAGACGACUCGCUGAGGAUCCGACA |
| 2019 | 190 | GGAGGAGCUACGAUGCGGCCGUCUCGCUCUCAUCCCAUGCGCGA AACCUCUCUCACUGCACAGACGACUCGCUGAGGAUCCGACA |
| 1393 | 191 | GGAGGAGCUACGAUGCGGUGAAUUCUUCCGGCACUUUGUCAUCU UCACCCCUAUGCUGCACAGACGACUCGCUGAGGAUCCGACA |
| 678 | 192 | GGAGGAGCUACGAUGCGGCCGAUUUUCGUCAUCCUCCAUACCAU CGCCCUACCGUUCCGCGUCAGACGACUCGCUGAGGAUCCGACA |
| 1051 | 193 | GGAGGAGCUACGAUGCGGCCCAUCACUCCCGCGUAUUGCGAACG CAUCGUUAUUUAGCUGUCAGACGACUCGCUGAGGAUCCGACA |
| 109 | 194 | GGAGGAGCUACGAUGCGGCCCAUCGCUCCCGCGUAUUGCGAACG CAUCGUUAUUUAGCCGUCAGACGACUCGCUGAGGAUCCGACA |
| 145 | 195 | GGAGGAGCUACGAUGCGGCCGAUUUCGGCAUCCUCCACACCAUC GCCUUACCGUUCCGCGUCAGACGACUCGCUGAGGAUCCGACA |
| 469 | 196 | GGAGGAGCUACGAUGCGGCCGAUUUCGUCAUCCUCCAUCAUCGC CUUACCGUUCCGCGUCAGACGACUCGCUGAGGAUCCGACA |
| 1076 | 197 | GGAGGAGCUACGAUGCGGUGAACUCUUCCGGCACUUUGUCAUCU UCACCCCCAUGCUGCACAGACGACUCGCUGAGGAUCCGACA |
| 1373 | 198 | GGAGGAGCUACGAUGCGGCCCAUCACUCCCGCGUAUUGCGAACG CAUCGUUAUUCAGCCGUCAGACGACUCGCUGAGGAUCCGACA |
| 2272 | 199 | GGAGGAGCUACGAUGCGGCCGUCUCGCUCUCAUCCCAUGCACAA AACCUCUCUCACUGCACAGACGACUCGCUGAGGAUCCGACA |
| 1100 | 200 | GGAGGAGCUACGAUGCGGCCGAUUUCGUCAUCCCCCAUACCAUC GCCUUACCGUUCCGCAGUCAGACGACUCGCUGAGGAUCCGACA |
| 452 | 201 | GGAGGAGCUACGAUGCGGCCGAUUUCGUCAUCCUCCACACCAUC GCCUUACUGUUCCGCGUCAGACGACUCGCUGAGGAUCCGACA |
| 1720 | 202 | GGAGGAGCUACGAUGCGGCCGUCUCGCUCUCAUCCCAUGCACGA AAUCUCUCUCACUGCACAGACGACUCGCUGAGGAUCCGACA |
| 1374 | 203 | GGAGGAGCUACGAUGCGGCCCAUCACUCCCGCGUAUUGCGAACG CAUCGCUAUUUAGCCGUCAGACGACUCGCUGAGGAUCCGACA |
| 283 | 204 | GGAGGAGCUACGAUGCGGCCGAUUUCGUCAUCCUCAUACCAUCG CCUUACCGUUCCGCGUCAGACGACUCGCUGAGGAUCCGACA |
| 1724 | 205 | GGAGGAGCUACGAUGCGGACCUUGUUUCCCUCUGUACCCCACUU CCCCAUUUCUCCCUGCUCAGACGACUCGCUGAGGAUCCGACA |
| 1083 | 206 | GGAGGAGCUACGAUGCGGUGAAUUCUUCCGGCACUUUGUCAUCU CCACCCCCAUGCUGCACAGACGACUCGCUGAGGAUCCGACA |
| 2282 | 207 | GGAGGAGCUACGAUGCGGUCGAUUUCGUCAUCCUCCAUACCAUC GCCUUACUGUUCCGCGUCAGACGACUCGCUGAGGAUCCGACA |
| 663 | 208 | GGAGGAGCUACGAUGCGGCCGAUUUCGUCAUCCUCCAUACCAUC GUCUUACCUUUCCGCGUCAGACGACUCGCUGAGGAUCCGACA |
| 172 | 209 | GGAGGAGCUACGAUGCGGCCGAUUUCGUCAUCCUCCAUACCAUC GCCUUACGUUCCGCGUCAGACGACUCGCUGAGGAUCCGACA |
| 153 | 210 | GGAGGAGCUACGAUGCGGCCGAUUUCGUCAUCCUCCAUACCAUC GCCUUACCACUCCGCGUCAGACGACUCGCUGAGGAUCCGACA |
| 324 | 211 | GGAGGAGCUACGAUGCGGACGGAGGAUAGUUGCUAAUCGAGCCC UGCUGACGCUUCAGACAGACGACUCGCUGAGGAUCCGACA |
| 2132 | 212 | GGAGGAGCUACGAUGCGGUGUACACUGAUUGCCUUUGUGUUAUG GGCGACAGAUCUGCCAGACAGACGACUCGCUGAGGAUCCGACA |
| 1390 | 213 | GGAGGAGCUACGAUGCGGUGAAUCCUUCCGGCACUUUGUCAUCU UCACCCCCAUGCUGCACAGACGACUCGCUGAGGAUCCGACA |
| 1400 | 214 | GGAGGAGCUACGAUGCGGUGAAUUCUUCCGGCACUUUGCCAUCU UCACCCCCAUGCUGCACAGACGACUCGCUGAGGAUCCGACA |
| 1380 | 215 | GGAGGAGCUACGAUGCGGACCUCGUUUUCCUCUGUACCCCACUU CCCCAUUUCUCCCUGCUCAGACGACUCGCUGAGGAUCCGACA |
| 1721 | 216 | GGAGGAGCUACGAUGCGGCCGUCUCGCUCUCAUCCCAUGCACGA AACCUCUCUAACUGCACAGACGACUCGCUGAGGAUCCGACA |
| 375 | 217 | GGAGGAGCUACGAUGCGGCCGUCUCGCUCUCAUCCCAUGCACGA AACCUCCCUCACUGCACAGACGACUCGCUGAGGAUCCGACA |
| 1064 | 218 | GGAGGAGCUACGAUGCGGCCGUCUCGCUCUCAUCCCAUGCACGA AACCUCUCUCACCGCACAGACGACUCGCUGAGGAUCCGACA |
| 787 | 219 | GGAGGAGCUACGAUGCGGCCCAUCACUCCCGCGUAUCGCGAACG CAUCGUUAUUUAGCCGUCAGACGACUCGCUGAGGAUCCGACA |
| 848 | 220 | GGAGGAGCUACGAUGCGGCCGAUUUUUCGUCAUCCUCCAUACCA UCGCCUUACCGUUCCGCGUCAGACGACUCGCUGAGGAUCCGACA |
| 575 | 221 | GGAGGAGCUACGAUGCGGCCGUCUCGCUCUCAUCCCAUGCACGA AACCCCUCUCACUGCACAGACGACUCGCUGAGGAUCCGACA |
| 240 | 222 | GGAGGAGCUACGAUGCGGCAGAUUUCGUCAUCAUCCAUACCAUC GCCUUACCGUUCCGCGUCAGACGACUCGCUGAGGAUCCGACA |
| 210 | 223 | GGAGGAGCUACGAUGCGGCCCAUCACUCCCGCGCACUGCGAACG CAUCGUUAUUUAGCCGUCAGACGACUCGCUGAGGAUCCGACA |
| 351 | 224 | GGAGGAGCUACGAUGCGGCCCAUCCCUCCCGCGUAUUGCGAACG CCUCGUUAUUUAGCCGUCAGACGACUCGCUGAGGAUCCGACA |
| 554 | 225 | GGAGGAGCUACGAUGCGGAAUCUCCCGAACGCAUUAGUCAGUCC CAUACCCGUGUGCCGCGUCAGACGACUCGCUGAGGAUCCGACA |
| 789 | 226 | GGAGGAGCUACGAUGCGGCCCAUCACUCCCGUGUAUUGCGAACG CAUCGUUAUUUAGCCGUCAGACGACUCGCUGAGGAUCCGACA |
| 288 | 227 | GGAGGAGCUACGAUGCGGCCGAUUUCGUCAUCCUCCAACCAUCG CCUUACCGUUCCGCGUCAGACGACUCGCUGAGGAUCCGACA |
| 785 | 228 | GGAGGAGCUACGAUGCGGCCCAUCACUCCCGCGUAUUGCGAACG CAUCGUUAUCUAGCCGUCAGACGACUCGCUGAGGAUCCGACA |
| 1430 | 229 | GGAGGAGCUACGAUGCGGACGAUUUCGUCAUCCUCCAUACCAUC GCCUUACCGUUCCGAGUCAGACGACUCGCUGAGGAUCCGACA |
| 1053 | 230 | GGAGGAGCUACGAUGCGGCCCAUCACUCCCGCGUAUUGCGAACG UAUCGUUAUUUAGCCGUCAGACGACUCGCUGAGGAUCCGACA |
| 2158 | 231 | GGAGGAGCUACGAUGCGGAUUACCAACUUGAACGCCGAGAGUGU GGUCAUGUGUUCUGCAGACAGACGACUCGCUGAGGAUCCGACA |
| 892 | 232 | GGAGGAGCUACGAUGCGGCCGAUUUUCGUCAUCCUCCAUGCCAU CGCCUUACCGUUCCGCGUCAGACGACUCGCUGAGGAUCCGACA |
| 596 | 233 | GGAGGAGCUACGAUGCGGUGGAUUCUUCCGGCACUUUGUCAUCU UCACCCCCAUGCUGCACAGACGACUCGCUGAGGAUCCGACA |
| 454 | 234 | GGAGGAGCUACGAUGCGGCCGAUUUCGUCAUCCUCCACACCAUC GCCUUACCCUUCCGCGUCAGACGACUCGCUGAGGAUCCGACA |
| 1763 | 235 | GGAGGAGCUACGAUGCGGCCGAUUUCGUCAUCCUCCAUACCAUC GUCUUACCGUUCUGCGUCAGACGACUCGCUGAGGAUCCGACA |
| 605 | 236 | GGAGGAGCUACGAUGCGGUGAAUUCUUCCGGCACUUUGUCAUCU UCACCCCCCAUGCUGCACAGACGACUCGCUGAGGAUCCGACA |
| 1073 | 237 | GGAGGAGCUACGAUGCGGACCUUGUUUUCCUCUGUACCCCACUU CCCAUUUCUCCCUGCUCAGACGACUCGCUGAGGAUCCGACA |
| 791 | 238 | GGAGGAGCUACGAUGCGGCCCAUCACUCCCGCGUAUUGCGAGCG CAUCGUUAUUUAGCCGUCAGACGACUCGCUGAGGAUCCGACA |
| 77 | 239 | GGAGGAGCUACGAUGCGGCCGAUUUCGUCAUCCUCCAUACCAUC GCCUUACCGUUCCGAGACAGACGACUCGCUGAGGAUCCGACA |
| 568 | 240 | GGAGGAGCUACGAUGCGGCCCAUCACUCCCGCGAAUUGCGAACG CAUCGUUAUUUAGCCGUCAGACGACUCGCUGAGGAUCCGACA |
| 803 | 241 | GGAGGAGCUACGAUGCGGCCGUCUCGCUCCCAUCCCAUGCACGA AACCUCUCUCACUGCACAGACGACUCGCUGAGGAUCCGACA |
| 571 | 242 | GGAGGAGCUACGAUGCGGCCCAUCACUCCCGCGUAUUGCGAACG CAUCGUUAUUAGCCGUCAGACGACUCGCUGAGGAUCCGACA |
| 585 | 243 | GGAGGAGCUACGAUGCGGACCUUGUUUUCCUCCGUACCCCACUU CCCCAUUUCUCCCUGCUCAGACGACUCGCUGAGGAUCCGACA |
| 851 | 244 | GGAGGAGCUACGAUGCGGCUGAUUUCGUCAUCCCCCAUACCAUC GCCUUACCGUUCCGCGUCAGACGACUCGCUGAGGAUCCGACA |
| 601 | 245 | GGAGGAGCUACGAUGCGGUGAAUUCUUCCGGCACUUUGUCAUCU UCACCCCCAUGCGGCACAGACGACUCGCUGAGGAUCCGACA |
| 706 | 246 | GGAGGAGCUACGAUGCGGACGGAGGAUAGUUGCUAAUCGAGCCC UGCGGACGCUUCAGACAGACGACUCGCUGAGGAUCCGACA |
| 1391 | 247 | GGAGGAGCUACGAUGCGGUGAAUUCUUCCGGCACUUUGUCAUCU UCACCCCCAGGCUGCACAGACGACUCGCUGAGGAUCCGACA |
| 471 | 248 | GGAGGAGCUACGAUGCGGCCGAUUUCGUAUCCUCCGUACCAUCG CCUUACCGUUCCGCGUCAGACGACUCGCUGAGGAUCCGACA |
| 116 | 249 | GGAGGAGCUACGAUGCGGCCGUCUCGAUCUCAUCCCAUGCACGA AACCUCUCUCACUGCACAGACGACUCGCUGAGGAUCCGACA |
| 47 | 250 | GGAGGAGCUACGAUGCGGCCGAUUUCGUCAUCCUCCAUACCAUC GCCUCCGUUCCGCGUCAGACGACUCGCUGAGGAUCCGACA |

[0046] As shown in FIGS. 2, HT-Toggle-cluster SELEX was used to isolate islet-specific aptamers crossreacting between mouse and human. 8 cycles of HT-cluster SELEX were performed as described in FIG. 1 using as negative and positive selectors mouse acinar tissues and mouse islets respectively (FIG. 2A). The resulting polyclonal aptamer from cycle 8 was used for two additional cycle of selection using either acinar tissue and islets from mice or acinar tissue and islets isolated from cadaveric donors (FIG. 2B). The resulting polyclonal aptamer library underwent HT-sequencing and bio-informatic analysis (FIG. 2C) to determine the frequency of each monoclonal aptamer present in the library selected using mouse or human tissues. Monoclonal aptamers (Table 3) enriched in the human library (putative aptamers against human islets, rectangular selection) were chosen for empirical testing. Table 3 provides also putative aptamers against human islets.

TABLE 3

aptamer sequences specific for human islets

| name | SEQ ID NO | Sequence |
|---|---|---|
| 166-279 | 251 | GGAGGACGAUGCGGCCGAUUUCGUCAUCCUCCAUACC AUCGCCUUACCGUUCCGCGUCAGACGACUCGCUGAGG AUCCGAGA |
| 109-2031 | 252 | GGAGGACGAUGCGGUGAAUUCUUCCGGCACUUUGUCA UCUUCACCCCCAUGCUGCACAGACGACUCGCUGAGGAU CCGAGA |
| 208-2529 | 253 | GGAGGACGAUGCGGCCGUCUCGCUCUCAUCCCAUGCA CGAAACCUCUCUCACUGCACAGACGACUCGCUGAGGAU CCGAGA |
| 64-2437 | 254 | GGAGGACGAUGCGGCCCAUCACUCCCGCGUAUUGCGA ACGCAUCGUUAUUUAGCCGUCAGACGACUCGCUGAGG AUCCGAGA |
| 173-2273 | 255 | GGAGGACGAUGCGGACCUUGUUUUCCUCUGUACCCCA CUUCCCCAUUUCUCCCUGCUCAGACGACUCGCUGAGGA UCCGAGA |
| 12-2617 | 256 | GGAGGACGAUGCGGUGUACACUGAUUGCCUUUGUGU UAUGAGCGACAGAUCUGCCAGACGACUCGCUGAGGAU CCGAGA |
| 107-901 | 257 | GGAGGACGAUGCGGGGAAGCAACACUUAGUCGCGAUU GAUACGUGCGCAGUCAUCAGACGACUCGCUGAGGAUC CGAGA |
| 155-1103 | 258 | GGAGGACGAUGCGGCCGAUUUUCGUCAUCCUCCAUAC CAUCGCCUUACCGUUCCCAGACGACUCGCUGAGGAUCC GAGA |
| 1-717 | 259 | GGAGGACGAUGCGGUAAUUCUCAGGAGGUGCGGAAC GGGAUAUGGAUUGUUCGCCAGACGACUCGCUGAGGAU CCGAGA |
| m1-2623 | 260 | GGAGGACGAUGCGGUACACUCAGUCACGUAGCACCGC AGUGACCCUUUGUACCGCAGACGACUCGCUGAGGAUC CGAGA |
| m5-3229 | 261 | GGAGGACGAUGCGGCCUAGUACAAAAGCCUGAUCUCU |
| | | GUGAGCAGACACUAGAACAGACGACUCGCUGAGGAUC CGAGA |
| m7-2539 | 262 | GGAGGACGAUGCGGAUUACCAACUUGAACGCCGAGAG UGUGGUCACGUGUUCUGCAGACGACUCGCUGAGGAUC CGAGA |
| m9-3076 | 263 | GGAGGACGAUGCGGGGAAGCAACACUUAGUCGCGAUU GAUACGUGCGCAGUCAUCAGACGACUCGCUGAGGAUC CGAGA |
| m12-3773 | 264 | GGAGGACGAUGCGGCAACAAACUAAUCAGACACGAGAC AGAGAGAUAGAUCUGCCAGACGACUCGCUGAGGAUCC GAGA |
| m24-3219 | 265 | GGAGGACGAUGCGGCAGGUGCGGGAUCUAAUGCGUA GACAGCCAUAUACUGACACAGACGACUCGCUGAGGAUC CGAGA |

TABLE 4

Putative human islet specific aptamers isolated via toggle-cluster SELEX (from FIGS. 2 )
Putative human islet specific aptamers isolated via toggle-cluster SELEX (from FIGS. 2 )

| aptamer name | SEQ ID NO | sequence |
|---|---|---|
| m2-1 | 266 | GGAGGAGCUACGAUGCGGCAGGUGCGGGGUCUAAUGCGUAGACAG CCAUAUACUGACACAGACAGACGACUCGCUGAGGAUCCGACA |
| m2-2 | 267 | GGAGGAGCUACGAUGCGGCAGGGGCGGGGUCUAAUGCGUAGACAG CCAUAUACUGACACAGACAGACGACUCGCUGAGGAUCCGACA |
| m322-3 | 268 | GGAGGAGCUACGAUGCGGGGAAGCAACACUUAGUCGCGAUUGAUGC GUGCGCAGUCAUCAGACAGACGACUCGCUGAGGAUCCGACA |
| m323-4 | 269 | GGAGGAGCUACGAUGCGGGGAAGCAACACUUAGUCGCGAUUGAUAU GUGCGCAGUCAUCAGACAGACGACUCGCUGAGGAUCCGACA |
| m630-5 | 270 | GGAGGAGCUACGAUGCGGGGAAGCAACACUUAGUCGCGAUUGAUAC GUGCGUAGUCAUCAGACAGACGACUCGCUGAGGAUCCGACA |
| m631-6 | 271 | GGAGGAGCUACGAUGCGGGGAAGCAACACUUAGUCGCGAUUGGUAC GUGCGCAGUCAUCAGACAGACGACUCGCUGAGGAUCCGACA |
| m635-7 | 272 | GGAGGAGCUACGAUGCGGGGAAGCAACACUUAGUCGCGAUUGAUAC GUGCGCGGUCAUCAGACAGACGACUCGCUGAGGAUCCGACA |
| m636-8 | 273 | GGAGGAGCUACGAUGCGGGGAAGCAACGCUUAGUCGCGAUUGAUAC GUGCGCAGUCAUCAGACAGACGACUCGCUGAGGAUCCGACA |
| m685-9 | 274 | GGAGGAGCUACGAUGCGGUAAUUCUCAGGAGGUGCGGAACGGGAU AUGGUUUGUUCGCCAGUCAGACGACUCGCUGAGGAUCCGACA |
| m703-10 | 275 | GGAGGAGCUACGAUGCGGUAAUUCUCAGGAGGUGCGGAACGGGAU AUGGAUUGUCCGCCAGUCAGACGACUCGCUGAGGAUCCGACA |
| m705-11 | 276 | GGAGGAGCUACGAUGCGGUAAUUCUCAGGAGGUGCGGAACGGGAU AUGGAAUGUUCGCCAGUCAGACGACUCGCUGAGGAUCCGACA |
| m706-12 | 277 | GGAGGAGCUACGAUGCGGUAAUUCUCAGGAGGUGCGGAGCGGGAU AUGGAUUGUUCGCCAGUCAGACGACUCGCUGAGGAUCCGACA |
| m1024-13 | 278 | GGAGGAGCUACGAUGCGGACCAUCGCUCCCGCGUAUUGCGAACGCA UCGUUAUUUAGCCGUCAGACGACUCGCUGAGGAUCCGACA |
| m1028-14 | 279 | GGAGGAGCUACGAUGCGGCCCAUCACUCCCGCGUAUUGCGUACGCA UCGUUAUUUAGCCGUCAGACGACUCGCUGAGGAUCCGACA |
| m1146-15 | 280 | GGAGGAGCUACGAUGCGGCCGGAGGCAGUCACUAAUCUUCACUUCC CUUAGACAUGCGCAGACAGACGACUCGCUGAGGAUCCGACA |
| m1157-16 | 281 | GGAGGAGCUACGAUGCGGGGAAGCAACACUUAGUCGCGAUUGAUAC GUGUGCAGUCAUCAGACAGACGACUCGCUGAGGAUCCGACA |
| m1161-17 | 282 | GGAGGAGCUACGAUGCGGGGAAGCAACAUUUAGUCGCGAUUGAUAC GUGCGCAGUCAUCAGACAGACGACUCGCUGAGGAUCCGACA |
| m1164-18 | 283 | GGAGGAGCUACGAUGCGGGGAGGCAACACUUAGUCGCGAUUGAUAC GUGCGCAGUCAUCAGACAGACGACUCGCUGAGGAUCCGACA |
| m1164-19 | 284 | GGAGGAGCUACGAUGCGGGGGAGCAACACUUAGUCGCGAUUGAUAC GUGCGCAGUCAUCAGACAGACGACUCGCUGAGGAUCCGACA |
| m1166-20 | 285 | GGAGGAGCUACGAUGCGGGGAAGCAAUACUUAGUCGCGAUUGAUAC GUGCGCAGUCAUCAGACAGACGACUCGCUGAGGAUCCGACA |
| m1170-21 | 286 | GGAGGAGCUACGAUGCGGGGAAGCAACACUUAGUCGGGAUUGAUAC GUGCCCAGUCAUCAGACAGACGACUCGCUGAGGAUCCGACA |
| m1200-22 | 287 | GGAGGAGCUACGAUGCGGCCGUCUCGCUCUCAUCCCAUGCACGACA CCUCUCUCACUGCACAGACGACUCGCUGAGGAUCCGACA |
| m1233-23 | 288 | GGAGGAGCUACGAUGCGGUAAUUCUCAGGAGGUACGGAACGGGAUA UGGAUUGUUCGCCAGUCAGACGACUCGCUGAGGAUCCGACA |
| m1234-24 | 289 | GGAGGAGCUACGAUGCGGUAAUUCUCAGGAGGUGCGGAACGGGAU AUGGAUGGUUCGCCAGUCAGACGACUCGCUGAGGAUCCGACA |
| m1246-25 | 290 | GGAGGAGCUACGAUGCGGUAAUUCUCAGGAGGUGCGGAACGGGAU AUGGGUUGUUCGCCAUACAGACGACUCGCUGAGGAUCCGACA |
| m1259-26 | 291 | GGAGGAGCUACGAUGCGGUAAUUCCCAGGAGGUGCGGAACGGGAU AUGGAUUGUUCGCCAGUCAGACGACUCGCUGAGGAUCCGACA |
| m1260-27 | 292 | GGAGGAGCUACGAUGCGGUAAUUCACAGGAGGUGCGGAACGGGAU AUGGAUUGUUCGCCAGUCAGACGACUCGCUGAGGAUCCGACA |
| m1303-28 | 293 | GGAGGAGCUACGAUGCGGCCGAUUGCGUCAUCCUCCAUACCAUCGC CUUACCGUUCCGCGUCAGACGACUCGCUGAGGAUCCGACA |
| m1617-29 | 294 | GGAGGAGCUACGAUGCGGCCCAUCACUCACGCGUAGUGCGAACGCA UCGUUAUUUAGCCGUCAGACGACUCGCUGAGGAUCCGACA |
| m1684-30 | 295 | GGAGGAGCUACGAUGCGGUGUACACUGAUUGCCUUUGGGUUAAGA GCGACAGAUCCGGCAGACAGACGACUCGCUGAGGAUCCGACA |
| m1721-31 | 296 | GGAGGAGCUACGAUGCGGGGAAGCGACACUUAGUCGCGAUUGAUAC GUGCGCAGUCAUCAGACAGACGACUCGCUGAGGAUCCGACA |
| m1723-32 | 297 | GGAGGAGCUACGAUGCGGGGAAGCAACACUUAGUCGGGAUUGAUAC GUGCCCAGUCAGCAGACAGACGACUCGCUGAGGAUCCGACA |
| m1793-33 | 298 | GGAGGAGCUACGAUGCGGUAAUUCUCAGGAGGCGCGGAACGGGAU AUGGAUUGUUCGCCAGUCAGACGACUCGCUGAGGAUCCGACA |
| m1794-34 | 299 | GGAGGAGCUACGAUGCGGUAAUUCUCAGGAGGAGCGGAACGGGAU AUGGAUUGUUCGCCAGUCAGACGACUCGCUGAGGAUCCGACA |
| m1800-35 | 300 | GGAGGAGCUACGAUGCGGUAAUUCUCAGGAGGUGCGGAACGGGAU ACGGAUUGUUCGCCAGUCAGACGACUCGCUGAGGAUCCGACA |
| m1800-36 | 301 | GGAGGAGCUACGAUGCGGUAAUUCUCAGGAGGUGCGGAACGGGAU AAGGAUUGUUCGCCAGUCAGACGACUCGCUGAGGAUCCGACA |
| m1808-37 | 302 | GGAGGAGCUACGAUGCGGUAAUUCUCAGGAGGUGCGGAACGGGAU AUGGAUUGCUCGCCAGUCAGACGACUCGCUGAGGAUCCGACA |
| m1809-38 | 303 | GGAGGAGCUACGAUGCGGUAAUUCUCAGGAGGUGCGGAACGGGAU AUGGAUUAUUCGCCAGUCAGACGACUCGCUGAGGAUCCGACA |
| m1810-39 | 304 | GGAGGAGCUACGAUGCGGUAAUUCUCAGGAGGUGCGGAACGGGAU AUGGAUUGUGCGCCAGUCAGACGACUCGCUGAGGAUCCGACA |
| m1811-40 | 305 | GGAGGAGCUACGAUGCGGUAAUUCUCAGGAGGUGCGGAACGGGAU AUGGAUUGUACGCCAGUCAGACGACUCGCUGAGGAUCCGACA |
| m1812-41 | 306 | GGAGGAGCUACGAUGCGGUAAUUCUCAGGAGGUGCGGAACGGGAU AUGGAUUGUUCGCAAGUCAGACGACUCGCUGAGGAUCCGACA |
| m1820-42 | 307 | GGAGGAGCUACGAUGCGGUAAUUCUCAGGAGGUGCGGAAUGGGAU AUGGAUUGUUCGCCAGUCAGACGACUCGCUGAGGAUCCGACA |
| m1823-43 | 308 | GGAGGAGCUACGAUGCGGUAAUUCGCAGGAGGUGCGGAACGGGAU AUGGAUUGUUCGCCAGACAGACGACUCGCUGAGGAUCCGACA |
| m2124-44 | 309 | GGAGGAGCUACGAUGCGGCCCAUCACUCCCGCGUAUUGCGACCGCA UCGUUAUUUAGCCGUCAGACGACUCGCUGAGGAUCCGACA |
| m2149-45 | 310 | GGAGGAGCUACGAUGCGGAUUACCAACUUGAACGCCGAAAGUGGGG UCACGUUUUCCGCAGACAGACGACUCGCUGAGGAUCCGACA |
| m2219-46 | 311 | GGAGGAGCUACGAUGCGGGGAAGCAACACUUAGUCGCGAUUGAUAC GUGCGCAGUCAUCGGACAGACGACUCGCUGAGGAUCCGACA |
| m2272-47 | 312 | GGAGGAGCUACGAUGCGGUAAUUCUCAGGUGGUGCGGAACGGGAU AUGGAUUGUUCGCCAGUCAGACGACUCGCUGAGGAUCCGACA |
| m2284-48 | 313 | GGAGGAGCUACGAUGCGGUGAUUCUCAGGAGGUGCGGAACGGGAU AUGGAUUGUUCGCCAGUCAGACGACUCGCUGAGGAUCCGACA |
| m2288-49 | 314 | GGAGGAGCUACGAUGCGGUAAUUCUCAGGAGGUGCGGAACGGGAU AUGGGUUGUUCGCCAGUCAGACGACUCGCUGAGGAUCCGACA |
| m2502-50 | 315 | GGAGGAGCUACGAUGCGGCCCAUCACUCCCGCGUAUUGCGAACGCA UCGUUAUUUAGCCAGACAGACGACUCGCUGAGGAUCCGACA |
| m2514-51 | 316 | GGAGGAGCUACGAUGCGGCCCAUCACUCACGCGAAUUGCGAACGCA UCGUUAUUUAGCCGUCAGACGACUCGCUGAGGAUCCGACA |
| m2548-52 | 317 | GGAGGAGCUACGAUGCGGCGCAUCACUCCCGCGUAUUGCGAACGCA UCGUUAUUUAGCCGUCAGACGACUCGCUGAGGAUCCGACA |
| m2569-53 | 318 | GGAGGAGCUACGAUGCGGAUUACCAACUUGAACGCCGAGAGUGUGG UCACGUGUUCUGCAGACAGACGACUCGCUGAGGAUCCGACA |
| m2578-54 | 319 | GGAGGAGCUACGAUGCGGCACAUACUGACAAUGGUUACCAGAGCAG GUCCGGCACAUCCAGACAGACGACUCGCUGAGGAUCCGACA |
| m2581-55 | 320 | GGAGGAGCUACGAUGCGGUUACGCGUUUAAGUCAUUGACGCGUUAC ACUGGAGGGGGCCAGACAGACGACUCGCUGAGGAUCCGACA |
| m2623-56 | 321 | GGAGGAGCUACGAUGCGGUACACUCAGUCACGUAGCACCGCAGUGA CCCUUUGUACCGCAGACAGACGACUCGCUGAGGAUCCGACA |
| m2675-57 | 322 | GGAGGAGCUACGAUGCGGGGAAGCAACACUUAGUCGUGAUUGAUAC GUGCGCAGUCAUCAGACAGACGACUCGCUGAGGAUCCGACA |
| m2708-58 | 323 | GGAGGAGCUACGAUGCGGUAAUUCUCGGGAGGUGCGGAACGGGAU AUGGAUUGUUCGCCAGUCAGACGACUCGCUGAGGAUCCGACA |
| m2715-59 | 324 | GGAGGAGCUACGAUGCGGUAAUUCUCAGGAGGUGCAGAACGGGAUA UGGAUUGUUCGCCAGUCAGACGACUCGCUGAGGAUCCGACA |
| m2726-60 | 325 | GGAGGAGCUACGAUGCGGUAAUUCUCAGGAGGUGCGGAACGGGAU AUGGAUUGUUGGCCAGUCAGACGACUCGCUGAGGAUCCGACA |
| m2728-61 | 326 | GGAGGAGCUACGAUGCGGUAAUUCUCAGGAGGUGCGGAACGGGAU AUGGAUUGUUAGCCAGUCAGACGACUCGCUGAGGAUCCGACA |
| m2856-62 | 327 | GGAGGAGCUACGAUGCGGCGGAUCACUCCCGCGUAUUGCGAACGC AUCGUUAUUUAGCCGUCAGACGACUCGCUGAGGAUCCGACA |
| m2908-63 | 328 | GGAGGAGCUACGAUGCGGCCCAUCACUCCCGCGUAUUGCGAACGCA UCGUUAUUGAGCCGUCAGACGACUCGCUGAGGAUCCGACA |
| m2913-64 | 329 | GGAGGAGCUACGAUGCGGCCCAUCACUCGCGCGUAUUGCGAACGCA UAGUUAUUUAGCCGUCAGACGACUCGCUGAGGAUCCGACA |
| m2929-65 | 330 | GGAGGAGCUACGAUGCGGCAACAAACUAAUCAGACACGAGGCAGAA AGAUAGGUCCGGCAGACAGACGACUCGCUGAGGAUCCGACA |
| m2951-66 | 331 | GGAGGAGCUACGAUGCGGUGUAGCGAGAAUCGCGUUGUUGGGUGG UCUGUUGUCAGACGACUCGCUGAGGAUCCGACA |
| m3075-67 | 332 | GGAGGAGCUACGAUGCGGGGAAGCAACACUUAGUCGCGAUUGAUAC GUGCGCAGUUAUCAGACAGACGACUCGCUGAGGAUCCGACA |
| m3076-68 | 333 | GGAGGAGCUACGAUGCGGGGAAGCAACACUUAGUCGCGAUUGAUAC GUGCGCAGUCAUCAGACAGACGACUCGCUGAGGAUCCGACA |
| m3076-69 | 334 | GGAGGAGCUACGAUGCGGUGAAGCAACACUUAGUCGCGAUUGAUAC GUGCGCAGUCAUCAGACAGACGACUCGCUGAGGAUCCGACA |
| m3076-70 | 335 | GGAGGAGCUACGAUGCGGGGAAGCAACACUUGGUCGCGAUUGAUAC GUGCGCAGUCAUCAGACAGACGACUCGCUGAGGAUCCGACA |
| m3076-71 | 336 | GGAGGAGCUACGAUGCGGGGAAGCAACACUUAGUCGCGAUUGAUAC GUGCGCAGUCAUCAGGCAGACGACUCGCUGAGGAUCCGACA |
| m3076-72 | 337 | GGAGGAGCUACGAUGCGGGAAGCAACACUUAGUCGCGAUUGAUACG UGCGCAGUCAUCAGACAGACGACUCGCUGAGGAUCCGACA |
| m3076-73 | 338 | GGAGGAGCUACGAUGCGGGGAAGCAGCACUUAGUCGCGAUUGAUAC GUGCGCAGUCAUCAGACAGACGACUCGCUGAGGAUCCGACA |
| m3078-74 | 339 | GGAGGAGCUACGAUGCGGGGAAGUAACACUUAGUCGCGAUUGAUAC GUGCGCAGUCAUCAGACAGACGACUCGCUGAGGAUCCGACA |
| m3092-75 | 340 | GGAGGAGCUACGAUGCGGUAACUCUCAGGAGGUGCGGAACGGGAU AUGGAUUGUUCGCCAGUCAGACGACUCGCUGAGGAUCCGACA |
| m3100-76 | 341 | GGAGGAGCUACGAUGCGGUAAUUCUCAGGAGGUGUGGAACGGGAU AUGGAUUGUUCGCCAGUCAGACGACUCGCUGAGGAUCCGACA |
| m3101-77 | 342 | GGAGGAGCUACGAUGCGGUAAUUCUCAGGAGGUGCGGAACGGGUU AUGGAUUGUUCGCCAGUCAGACGACUCGCUGAGGAUCCGACA |
| m3104-78 | 343 | GGAGGAGCUACGAUGCGGUAAUUCUCAGGAGGUGCGGAACGGGAU AUGGAUUGUUCGCGAGUCAGACGACUCGCUGAGGAUCCGACA |
| m3117-79 | 344 | GGAGGAGCUACGAUGCGGCCGAUUUCGUCAUGCUCCAUACCAUCGC CUUACCGUUCCGCGUCAGACGACUCGCUGAGGAUCCGACA |
| m3211-80 | 345 | GGAGGAGCUACGAUGCGGCCCAUCACUCGCGCGUAUUGCGAACGCA UCGUUAUUUAGCCGUCAGACGACUCGCUGAGGAUCCGACA |
| m3219-81 | 346 | GGAGGAGCUACGAUGCGGCAGGUGCGGGAUCUAAUGCGUAGACAG CCAUAUACUGACACAGACAGACGACUCGCUGAGGAUCCGACA |
| m3219-82 | 347 | GGAGGAGCUACGAUGCGGCAGGGGCGGGAUCUAAUGCGUAGACAG CCAUAUACUGACACAGACAGACGACUCGCUGAGGAUCCGACA |
| m3229-83 | 348 | GGAGGAGCUACGAUGCGGCCUAGUACAAAAGCCUGAUCUCUGUGAG CAGACACUAGAACAGACAGACGACUCGCUGAGGAUCCGACA |
| m3248-84 | 349 | GGAGGAGCUACGAUGCGGUGUACACUGAUUGCCUUUGUGUUAUGA GCGACAGAUCUGCCAGACAGACGACUCGCUGAGGAUCCGACA |
| m3250-85 | 350 | GGAGGAGCUACGAUGCGGCAUACACACUUGACUUUAGGGAACGAAC CUCUAGCCGUGGCCAGACAGACGACUCGCUGAGGAUCCGACA |
| m3265-86 | 351 | GGAGGAGCUACGAUGCGGACGGAGGAUAGUUGCUAAUCGAGCCCU GCUGACGCUUCAGACAGACGACUCGCUGAGGAUCCGACA |
| m3428-87 | 352 | GGAGGAGCUACGAUGCGGCCGUCUCGCUCUCAUCCCAUGCACGAAA CCUCUCUCAGUGCACAGACGACUCGCUGAGGAUCCGACA |
| m3435-88 | 353 | GGAGGAGCUACGAUGCGGUAAUUCUCAGGGGGUGCGGAACGGGAU AUGGAUUGUUCGCCAGUCAGACGACUCGCUGAGGAUCCGACA |
| m3435-89 | 354 | GGAGGAGCUACGAUGCGGUAAUUCUCAGGAGGUGCGGAACGGGAC AUGGAUUGUUCGCCAGUCAGACGACUCGCUGAGGAUCCGACA |
| m3435-90 | 355 | GGAGGAGCUACGAUGCGGUAAUUCUCAGGAGGUGCGGAACGAGAUA UGGAUUGUUCGCCAGUCAGACGACUCGCUGAGGAUCCGACA |
| m3435-91 | 356 | GGAGGAGCUACGAUGCGGUAAUUCUCAGGAGGUGCGGAACGGGAU AUGAAUUGUUCGCCAGUCAGACGACUCGCUGAGGAUCCGACA |
| m3435-92 | 357 | GGAGGAGCUACGAUGCGGUAAUUCUCAGGAAGUGCGGAACGGGAUA UGGAUUGUUCGCCAGUCAGACGACUCGCUGAGGAUCCGACA |
| m3500-93 | 358 | GGAGGAGCUACGAUGCGGCCCAUCACUCCCGCGUAUGGCGAACGCA UCGUUAUUUAGCCGUCAGACGACUCGCUGAGGAUCCGACA |
| m3523-94 | 359 | GGAGGAGCUACGAUGCGGUCAUGGAUUCAUUACAGGAGGUGCGGU GCUAUAUGCACGCCAGACAGACGACUCGCUGAGGAUCCGACA |
| m3546-95 | 360 | GGAGGAGCUACGAUGCGGCCAGCCACACUUUGACCGAAUUGGCAAG CGCGGGCAAAUCGAACAGACGACUCGCUGAGGAUCCGACA |
| m3548-96 | 361 | GGAGGAGCUACGAUGCGGCCUAGUACAAAAGCCUGAUCUUUGGGAA CCGACCCUAGGACAGACAGACGACUCGCUGAGGAUCCGACA |
| m3550-97 | 362 | GGAGGAGCUACGAUGCGGCUUACAGCUCACCAUUUAUGGGAGGCCC GGUGUUGUGUUCCAGACAGACGACUCGCUGAGGAUCCGACA |
| m3565-98 | 363 | GGAGGAGCUACGAUGCGGAUUAUUGUUUGACGUAUUCCAAGUGAGA UUACGCACGCACCAGACAGACGACUCGCUGAGGAUCCGACA |
| m3568-99 | 364 | GGAGGAGCUACGAUGCGGAACAGCUUAAUCGCCAGUCGAUACGCGC CAUACAUCAUCACAGACAGACGACUCGCUGAGGAUCCGACA |
| m3745-100 | 365 | GGAGGAGCUACGAUGCGGUAAUUCUCAGGAGAUGCGGAACGGGAUA UGGAUUGUUCGCCAGUCAGACGACUCGCUGAGGAUCCGACA |
| m3745-101 | 366 | GGAGGAGCUACGAUGCGGUAAUUCUCAGGAGGUGCGAAACGGGAUA UGGAUUGUUCGCCAGUCAGACGACUCGCUGAGGAUCCGACA |
| m3748-102 | 367 | GGAGGAGCUACGAUGCGGACGAUUUCGUCAUCCUCCAUACCAUCGC CUUACCGUUCAGCGUCAGACGACUCGCUGAGGAUCCGACA |
| m3773-103 | 368 | GGAGGAGCUACGAUGCGGCAACAAACUAAUCAGACACGAGACAGAG AGAUAGAUCUGCCAGACAGACGACUCGCUGAGGAUCCGACA |
| m3788-104 | 369 | GGAGGAGCUACGAUGCGGUUAUGCGUUUAAGUCAUUGACGCGUUAC ACUGGAGGGGGCCAGACGACUCAGACGACUCGCUGAGGAUCCGACA |
| m3823-105 | 370 | GGAGGAGCUACGAUGCGGACGGAGGAUAGUUGCUAAUCGAGCCCU GCGGACGCUUCAGACAGACGACUCGCUGAGGAUCCGACA |
| m3831-106 | 371 | GGAGGAGCUACGAUGCGGCUUACAGCUCACCAUUUUUGGGAGGCC CGGUGUUGUGUUCCAGACAGACGACUCGCUGAGGAUCCGACA |
| m3845-107 | 372 | GGAGGAGCUACGAUGCGGACGGAAGGAUAGUUGCUAAUCGAGCCCU GCCGACGCUUCAGACAGACGACUCGCUGAGGAUCCGACA |
| m3997-108 | 373 | GGAGGAGCUACGAUGCGGUAAUUCUCAGGAGGUGCGGAACGGGAU AUAGAUUGUUCGCCAGUCAGACGACUCGCUGAGGAUCCGACA |
| m3997-109 | 374 | GGAGGAGCUACGAUGCGGUAAUUCUCAGAAGGUGCGGAACGGGAUA UGGAUUGUUCGCCAGUCAGACGACUCGCUGAGGAUCCGACA |
| m3997-110 | 375 | GGAGGAGCUACGAUGCGGUAAUUCUCAGGAGGUGCGGAACGGGAU AUGGAUUGUUCGCCCGUCAGACGACUCGCUGAGGAUCCGACA |
| m3997-111 | 376 | GGAGGAGCUACGAUGCGGUAAUUCUCAAGAGGUGCGGAACGGGAUA UGGAUUGUUCGCCAGUCAGACGACUCGCUGAGGAUCCGACA |
| m4097-112 | 377 | GGAGGAGCUACGAUGCGGCAAAAACUGAUAAACACAGGUCCGGCAU UUGAGCGUACACCCAGACAGACGACUCGCUGAGGAUCCGACA |
| m4110-113 | 378 | GGAGGAGCUACGAUGCGGUCGGAGGAUAGUUGCUAAUCGAGCCCU GCCGACGCUUCAGACAGACGACUCGCUGAGGAUCCGACA |
| m4275-114 | 379 | GGAGGAGCUACGAUGCGGUUAUGCGUUUAAGUCAUUGACGCGUUAC ACUGGAGGGGGCCAGACAGACGACUCGCUGAGGAUCCGACA |
| m4347-115 | 380 | GGAGGAGCUACGAUGCGGCAAAAAACUGAUAAACACAGGUCCGGCA UUUGAGCGUACACCCAGACAGACGACUCGCUGAGGAUCCGACA |
| m4365-116 | 381 | GGAGGAGCUACGAUGCGGACGGAGGAUAGUUGCUAAUCGAGCCCU GCCGACGCUUCAGACAGACGACUCGCUGAGGAUCCGACA |

[0047] Next, the specificity for human islets of the identified monoclonal aptamers were tested with the two high throughput cluster SELEX strategies described in FIG. 1 and FIGS. 2. Briefly, monoclonal aptamers corresponding to the sequences identified by the bio-informatic analysis were generated by PCR and T7 RNA polymerase using overlapping oligonucleotides as template. The resulting monoclonal aptamers were labelled with Cyanin-3 and used as fluorescent probes on sections of human pancreas from cadaveric donor. Clone number is reported with the prefix “m” indicating the identification of aptamer from the HT-Toggle cluster SELEX. Data show that while some aptamers (m166-279, m5-3229, 107-901, m7-2537, m9-3076, 1-717, 173-2273, m12-3772) show a good specificity for the islets, others label also the acinar tissue (12-2617, 109-2031, m1-2623, m24-3219), and others did not show any staining (208-2529, 155-1113, 64-2437).

[0048] In order to evaluate further the specificity of the chosen monoclonal aptamers, the best performers of FIG. 4 (166-279, 173-2273, 107-901, 1-717, m1-2623, m5-3239, and m12-3773) were used to stained FDA approved tissues microarrays. Each of these arrays contains sections from 30 human tissues (with each tissue replicated from 3 different donors) and are usually used for antibodies screening but have not yet been used for aptamer evaluation. Briefly, these tissues microarrays were stained with the chosen cy3 labelled RNA aptamers of irrelevant aptamers as control. Each tissue was then analyzed by immunofluorescence microscopy. While most of the aptamers show binding not only as expected in the pancreatic islet but also in other tissues (FIG. 5C), aptamer 1-717 (FIG. 5A) and aptamer m12-3773 (FIG. 5B) show an extraordinary specificity for the pancreatic islets and negligible binding to the other tissues evaluated (adrenal, bone marrow, breast, brain, colon, endothelial, esophagus, fallopian tube, heart, kidney, liver, lung, lymph node, Ovary, placenta, prostate, skin, spinal cord, spleen, muscle, stomach, testis, thymus, thyroid, ureter, uterus, and testis).

[0049] To evaluate if aptamer 1-717 and m12-3772 can recognize not only human islets but also the mouse counterpart, staining with these two Cy-3 labelled monoclonal aptamers were performed on tissues microarrays each containing 11 tissues from healthy mice. These experiments show that both aptamer 1-717 and aptamer m12-3773 can also recognize mouse islets. See FIG. 6. However, in contrast to what observed on human tissues, both aptamers can recognize at different level not only the pancreatic tissue but also the spleen, the stomach, and the jejunum. These data suggest that differences in the distribution of the cognate targets may exist between the two species.

[0050] To evaluate better the specificity of the aptamers within the islets, two different techniques were employed: confocal microscopy (FIG. 7A and FIG. 7B) and flow cytometry (FIG. 7C and FIG. 7D). For confocal microscopy, sections of human pancreas were stained with cy-3 labelled aptamer M12-3773 (FIG. 7A) or cy3-labeled aptamer 1-717 (FIG. 7B). Sections were counterstained with antibodies against insulin and glucagon, and DAPI and evaluated by confocal microscopy. Data show binding of both aptamers to both alpha and beta cells but with an higher signal on beta cells.

[0051] For flow cytometry, single cell suspension of human islets were stained with Cy3 labelled aptamer M12-3773 (FIG. 7C) or cy3-labeled aptamer 1-717 (FIG. 7D), counterstained with vital dye and antibodies specific for insulin and glucagon, and analyzed. Aptamer signal (open histograms) was quantified on the alpha (top histograms) or beta cells (right histograms) after gating respectively on glucagon positive or insulin positive cells (contour plot). An irrelevant aptamer (filled histograms) was used as negative control.

[0052] Clusterin is a possible target for aptamer m12-3773. 3′biotin-aptamer m12-3773 was synthetized with a oligo synthesizer and used to label single cell suspension from human islets. Cells were washed and their cytoplasm lysed with tween20/BSA solution. Aptamers bound to their ligand recovered with magnetic beads and magnetic separation. Capture ligands were released by the aptamer-beads complex at 95° C. in SDS and run in SDS page. Bands were cut and subjected to mass spectrometry and mascot-based analysis (FIG. 8A). Clusterin (UniProtKB - P10909) (FIG. 9B) was one of the protein with the higher score (236), had an elevated sequence covered from peptides identified by mass spectrometry, had a molecular weight compatible to the one of the band cut from the SDS page, and more importantly, was the only one of the tested one whose silencing reduced the capacity of aptamer m12-7337, but not of aptamer 1-717, to bind to beta cells (FIG. 8C).

[0053] FIGS. 9 shows that TMED6 is the putative target for aptamer 1-717. FIG. 9A shows the experimental strategy to detect the target for aptamer 1-717. To identify the target of aptamer 1-717, protein arrays (HuProt™ v2.0, Arrayit) were used. These protein arrays contains more than 19,000 human recombinant proteins allowing, by informatics analysis, the identification of the cognate protein of antibodies, peptides, or protein. This technology has been adapted for the identification of aptamer’s ligands. Briefly, pre-blocked arrays were hybridized with 1 µg of cy3 labeled 1-717 or m12-3773 in blocking buffer for 30′ at RT. Arrays were washed, read in triplicate on a Genepix microarray reader and analyzed by an ad hoc generated software. This software 1) acquires the data from the gpr file, 2) adds a description column with (GeneID, Control, blank, ND), 2) use a optimized “plotArray” function modified in several points (the script was implemented for a specific protein array, plus some problem in UTF file format), 3) performs a quality control that includes a microarray image rebuilding the generation of MA plots, 4) normalized the data and substracts the background; and 5) analyze the differential expression between arrays via graphs of p-value distribution, volcano plot, and analysis of significant modulation by t-test. This analysis proposed TMED6 (NM144676.1, protein id Q8WW62) as the most likely ligand of aptamer 1-717. See FIG. 9B. Competitive assays (FIG. 9C) confirm the specificity of this target. As shown in FIG. 9C, competitive assays confirm the specificity of aptamer 1-717 for TMED6. Briefly, serial sections of human pancreas were stained with Cy-3 labelled aptamer 1-717 in the presence of different concentration of recombinant TMED6 protein (i.e., molar ratio aptamer/recombinant protein range= 1/1-⅒). Images were acquired by a fluorescence microscope and aptamer binding quantified by cellprofiler. Data show that addition of recombinant TMED6 inhibit aptamer 1-717 binding in a dose dependent manner strongly suggesting that TMED6 is the target of this aptamer.

### Example 2 - Identified Aptamers Were Islet Specific in Vivo

[0054] To evaluate whether aptamer 1-717 and m12-3773 can recognize human islets in vivo, we employed immunodeficient NSG mice engrafted with human islets in the epydidimal fatpad. Additionally, we use a new formulation of aptamer 1-717 and aptamer m12-3773 in which each monoclonal aptamer is biotinylated and complexed with streptavidin to form a tetrameric nanoparticle (hereafter called tetraptamer). This formulation has a superior pharmacokinetic and better affinity than the corresponding monomeric aptamer.

[0055] Biotin/streptavidin Alexafluor (AF750)-labeled aptamers (amptamer 1-717 or aptamer m12-3773, or an equimolar mixture of the two aptamers) were injected intravenously in immunodeficient NSG mice (engrafted with human islets in the epididymal fat pad (EFP)) to evaluate whether m12-3773 and 1-717 can recognize human islets in vivo. A cumulative-synergistic signal was observed in the EFP region when the mixture of both aptamers was used possibly because different islet epitopes were targeted by each aptamer (FIG. 10A). 4 hour later fluorescence signal in epididymal fat pad region was measure by “In vivo imaging system (IVIS)”. The data in FIG. 10B shows that both aptamer 1-717 and aptamer m12-3773 can recognize the islets in vivo. Additionally this experiment reveals that the use of an equimolar mixture of the two aptamers significantly increase the signal to background ratio.

[0056] To determine if aptamers m12-3773 and 1-717 can be used to measure β cells mass in vivo, immune deficient NSG mice were transplanted with different quantities (range 62.5-500 IEQ) of human islets in the epididymal fatpad. 21 days later, mice were injected iv with Alexafluor 750 tetraptamer generated by the complexation of an equimolar mixture of aptamer 1-717 and m12-3773 to streptavidin. 4 hours later signal was quantified by IVIS. FIG. 11A. Aptamers m12-3773 and 1-717 recognized both the mouse endogenous islets and the human islets transplanted in the EFP (FIG. 11B). Importantly, fluorescence signal in the EFP region was proportional to the number of engrafted islets indicating that these aptamers can be used to measure β cell mass in vivo (FIGS. 11B and 11C). The signal from the islets persisted for 10 days after injection (not shown). As shown in FIG. 11D, rejection of the allogeneic C57B16 islet graft can be measured over time as seen by the loss of signal on the left flank. Instead signal (right panel of FIG. 11D) of the syngeneic graft is maintained over time indicating graft survival.

[0057] In summary, the selected aptamers m12-3773 and 1-717 bind mouse and human β cells with good specificity in vitro and in vivo and thus may be useful in targeting therapeutics to human β cells in vivo.

### Example 3 - Aptamera Chimera Can Deliver Therapeutic RNA to Islets

[0058] As shown in FIG. 12, islet-specific RNA aptamers 1-717 and m12-3773 can be easily conjugated to therapeutic RNA by prolonging their 3′ end with a trinucleotide linker region (i.e. GGG) and the passanger strand (passanger tail) of the desired therapeutic RNA. The therapeutic RNA guide strand is then simply annealed to the modified aptamer by admixing equimolar quantities of the two RNAs at 70° C. and allowing the mixture to slowly cool down at room temperature.

[0059] To evaluate if aptamers can be a non-viral alternative for transfecting β cells, we conducted proof of principle experiments aimed to knockdown via aptamer delivery insulin (INS) 1 and 2 in non-dissociated mouse islets. FIG. 13A is a schematic of the experimental procedure. Islets specific aptamer chimera were generated as detailed in FIG. 12 by conjugating aptamer 1-717 or aptamer m12-3773 with siRNA specific for mouse insulin½ (INS½) or the inhibitor of cell proliferation human p57kip2 (uniprot P49918, alias CDN1c). The INS 112-siRNA/aptamer chimera was added to non-dissociated mouse islets whereas the p57kip2-siRNA/aptamer chimera was added to human islets from a cadaveric donor. Scramble siRNA/aptamer chimera were used as negative controls. 72 hours later, expression of INS ½ and p57kip2 was quantified by qRT-PCR on transfected mouse islets and transfected human islets respectively. As shown in FIG. 13B, the aptamer chimera significantly downregulate the expression of the target gene.

[0060] As shown in FIGS. 14, p57kip2-siRNA-islet specific aptamer chimera induce human beta cell proliferation in vivo. FIG. 14A shows the experimental procedure: Streptozotocin-treated, immune deficient NSG mice were transplanted with a suboptimal quantity (250 IEQ) of human islets in the anterior chamber of the eye. Mice were maintained euglycemic by s.c. implantation of insulin pellet. 21 days later, when islets were vascularized, insulin pellet was removed to allow the development of hyperglycemia, mice were fed with BrdU for 7 days to evaluate cell proliferation, and treated with i) scramble-siRNA/aptamer chimera, or ii) p57kip2-siRNA/aptamer chimera. Nine days after treatment, mice were humanely euthanized, and beta and alpha cell proliferation was evaluated by immune fluorescence microscopy after labeling the graft sections with antibodies against insulin, glucagon, and BrDU (white). FIG. 14B provides immunofluorescence pictures of the graft from mice treated with control chimera or p57kip2-siRNA/aptamer chimera. Glucagon and insulin staining is depicted in dark gray as pseudocolor whereas BrdU staining as measure of cell proliferation is depicted in white as pseudocolor. FIG. 14C shows quantification of proliferating beta and alpha cells. Taken together these data indicate that p57kip2-siRNA/aptamer chimera can induce in vivo human beta cell proliferation in a hyperglycemic setting that mimic T1 and T2 diabetes.

[0061] P57kip2 silencing in β cells has important therapeutic implications. Indeed, mutations of p57Kip2 are associated with focal hyperinsulinism of infancy (FHI), a clinical syndrome characterized by a dramatic non-neoplastic clonal expansion of β cells (14), overproduction of insulin, and severe uncontrollable hypoglycemia (89,90). FHI’s focal lesions are characterized by excessive β cell proliferation that correlates with p57kip2 loss (91,92). Although the pro-proliferative activity of p57kip2 silencing is not desirable in FHI and in cancers, a temporally defined silencing might be useful to promote adult β cell proliferation in T1D. Indeed, adenoviral-shRNA mediated silencing of p57kip2 in human islets obtained from deceased adult organ donors increased β cell replication by more than 3-fold once the islets were transplanted into hyperglycemic, immune-deficient mice (14). The newly replicated cells retained properties of mature β cells, such as expression of insulin, PDX1, and NKX6.114. Interestingly, no β cell proliferation was observed in normoglycemic mice indicating that hyperglycemia may provide additional pro-proliferative signals (93). These findings opened the possibility for a new therapeutic intervention to restore an adequate β cell mass in patients with T1D and/or to reduce the number of islets needed during transplantation. However, to date the translatability of these finding was hindered by safety concerns associated with use of viral vectors and neoplasm formation as a result of stable p57Kip2silencing. Indeed, p57Kip2 is frequently downregulated in human cancers (94) and has been proposed as a tumor suppressor gene since its ectopic expression is sufficient to halt neoplastic cell proliferation (94). However, a temporally controlled modulation of p57kip2 through aptamer delivery may be important in diabetes to increase β cell proliferation in a temporally controlled manner. This might be sufficient to increase β cell mass during timed administrations while avoiding the safety concerns with non-controllable, neoplastic-like proliferation of β cells that may results with stable silencing.

### Example 4 - Upregulation of XIAP Via saRNA-Aptamer Chimera Inhibits Apoptosis in Β Cells.

[0062] Apoptotic cell death is a hallmark in the loss of insulin-producing β cells in all forms of diabetes (99-101). Leukocytes infiltration and activation as well as high glycemia within the islets leads to high local concentrations of apoptotic trigger including inflammatory cytokines, chemokines, and reactive oxygen species99. Most of these apoptotic pathways converge onto caspase (CASP) 3 and 7 activation leading to genetic reprogramming, phosphatidylserine flip, and apoptotic bodies formation (102).

[0063] β cell apoptosis can further feed the autoimmune process by stimulating self-antigen presentation and autoreactive T cell activation (103). Similarly, in islets transplantation setting, primary non-function, i.e. the partial but significant and sometimes total loss of the grafted islet mass, which occurs early after transplantation (104-106). β cell apoptosis initiates during the isolation procedure and upon transplantation is exacerbated by hypoxia and hyperglycemia as well as pro-coagulatory and proinflammatory cascades (107). Primary-non-function accounts for more than 50% of the functional islet mass loss occurring during the first 48 hours after transplantation (106).

[0064] Thus, blocking even temporally apoptotic β cell death is highly desirable not only to preserve β cell mass in type 1 diabetes (T1D) and in islet transplantation but also to reduce auto-reactive T cell activation and further immune damage.

[0065] This protein is most potent member of the apoptosis-inhibitor family and prevents the activation of CASP 3, 7 and 9(108); ii) Xiap overexpression using viral vector improved β cell viability, prevented their cytokine- or hypoxia-induced apoptosis(109-111), iii) Xiap transduced human islets prolonged normoglycemia when are transplanted in diabetic NOD-SCID mice (11). However, since Xiap is upregulated in many cancers, its stable overexpression raise important safety concerns. Therefore, a controlled Xiap activation via saRNA delivered with islets specific aptamers can be useful alternative to reduce primary nonfunction, prevent β cell loss and the self-feeding autoimmune process in T1D.

[0066] Small activating RNAs (saRNAs) are oligonucleotides that exert their action in specific promoter regions and upregulate mRNA and protein expression for up to 4 weeks (depending on cell replication, mRNA and protein turn-over) (112-122). saRNA-mediated gene upregulation through mechanisms still not fully understood but is thought to involve epigenetic changes or down-modulation of inhibitory RNA (123-125). saRNAs provide safe, specific, and temporary gene activation without the insertion of DNA elements since their specificity is comparable to that of gRNA in CRISP/CAS9 system but no irreversible DNA modification are induced 126. While therapeutic saRNAs are being investigated for cancer treatment, to our knowledge no studies have been performed in T1D (127-130).

[0067] Therefore, we have identified saRNAs capable of specifically upregulating the anti-apoptotic gene XIAP. Briefly, we have first examined the human XIAP promoter using the previously described algorithms (112,131). This analysis that includes genome blast analysis to avoid non-specific sequences, returned more than 156 putative saRNA target regions. We synthetized the 96 putative saRNA with highest scores and tested them for their capacity to upregulate Xiap by transfecting the human epithelial cell line A549. This cell line was used because it is easily transfectable, has low basal expression of PDL1 and Xiap. qRT-PCR was performed 96 hours after transfection and results were normalized on the same cell line transfected with scrambled saRNA (FIGS. 15). Twelve saRNAs (provided in Table 5) were found to upregulate Xiap expression more than 10 times (range 10.4-74.8) over scrambled saRNA.

TABLE 5

saRNA sequences to upregulate human Xiap

| Position | Fold change | Xiap saRNA sequence | SEQ ID NO |
|---|---|---|---|
| -234 | 74.8083 | UAGCUGAAGUUCAUCUCUCuu | 382 |
| -1134 | 46.7026 | UUUCAGCCUUAAGGAUGGUuu | 383 |
| -449 | 37.1938 | UUUAUUCUCCCCUUGGGUGuu | 384 |
| -344 | 18.7146 | UACUCCCUCUGCCUAUGUGuu | 385 |
| -121 | 15.4365 | UUUACUGUUUUGGCUGGGCuu | 386 |
| -682 | 13.9281 | AAAAUGCUGGUCAUACCCUuu | 387 |
| -354 | 13.1961 | UUGUUCAAACUACUCCCUCuu | 388 |
| -374 | 12.5789 | UUUUCCUGCCUUCCGCUAAuu | 389 |
| -593 | 11.9908 | UUACAGGGUAAUGUGGUGAuu | 390 |
| -758 | 11.0947 | GAUUGGGAGGUGAAGGGAAuu | 391 |
| -680 | 10.6792 | AAUGCUGGUCAUACCCUGGuu | 392 |
| -531 | 10.5239 | UACAAGAUAUGAUCCUCCCuu | 393 |

[0068] In vitro proof of principle experiments were performed using human islets isolated from cadaveric donors to determine if Xiap-saRNA delivered by aptamer can protect β cell from apoptosis. Xiap-saRNA aptamer chimeras were generated as described in FIG. 12 by conjugating the identified Xiap saRNA (-449, table 2) to either aptamer m12-3773 or aptamer 1-717. FIG. 16A shows the experimental procedure: Freshly-isolated, non-dissociated, human islets (200IEQ) from cadaveric donor were transfected with Xiap-saRNA by adding the Xiap/saRNA aptamer chimera (5ug) to the culture. Scramble saRNA/aptamer chimera were used as negative control. 48 hours later, half of the wells were challenged with inflammatory cytokines (IFNg, TNFa, and IL1b) to induce beta cell apoptosis. Beta cell death was evaluated by flow cytometry 24 hours after cytokine challenge by measuring beta/alpha cell ratio after staining for insulin and glucagon. FIG. 16B shows the flow cytometry analysis of single cell suspension of islets treated with scrambled saRNA chimera (CTRL chimera) or XIAP-saRNA/aptamer chimera (Xiap Chimera) and later challenged with cytokines (CTK) or left untreated (No CTK). FIG. 16C is a spaghetti plot from 5 independent experiments each with islets from a different cadaveric donor using chimera generated with either aptamer m12-3773 or aptamer 1-717. Paired T test value is reported. Data show that Xiap-saRNA aptamer chimera protect beta cells from cytokine-induced apoptosis.

[0069] Interestingly, untreated islets in the absence of cytokines showed higher proportion in α cells (β/α cell ratio=0.8) in the presence of CTRL-chimera (FIG. 16B) and in absence of any chimera (data not shown), suggesting that β cell viability may be affected more than α cells during islet isolation. Addition of cytokines further reduced β cell proportion (β/α cell ratio~0.5). Notably, incubation with Xiap-saRNA/chimera not only prevented the CTKs-induced decrease in β cells (β/α cell ratio~1.6) but also prevented β cell loss associated with islets isolation. These data indicate that saRNA-chimeras can be used to modulate Xiap expression in human islets.

### Example 5 - Use of Xiap-saRNA/Aptamer Chimera to Prevent Primary Nonfunction

[0070] Human islets from cadaveric donors were transfected with Xiap-saRNA aptamer chimera or control-chimera as detailed in FIG. 17A Twenty-four hours after transfection, islets were transplanted in the anterior chamber of the eye of immune deficient NSG mice. Islets cell apoptosis was evaluate longitudinally by in vivo annexin V (ANXA5) staining and in vivo microscopy. Data show that treatment with Xiap-saRNA/aptamer chimera before transplantation drastically reduce apoptosis (ANXA5), and thus cellular loss of the graft.

[0071] Provided in FIG. 17B is the schematic the Xiap-saRNA/aptamer chimera for graft preservation. As shown in FIG. 17C, human Islets were cultured in media where chimera was added at 48h, 24h and on the day of transplantation 600 IEQ were transplanted per mouse in the left kidney capsule of streptozotocin diabetic NOG mice. Data showed that pretreatment of human islets with aptamer chimera greatly improve the efficacy of islet transplantation with approximately 80% of mice becoming normoglycemic by day 2. In contrast only 50% od mice engrafted with islets (P=0.02; n_{chimera treated}= 10; n_{untreated} = 8) reverse diabetes and with a delayed kinetic.

### Example 6 - Protect Islets From Allo- and Auto-immunity in Humanized Mice Via PDL1-saRNA/Aptamer Chimera

[0072] The clinical importance of PDL1 expression in the maintenance of tissue specific tolerance is highlighted by the success of PDL1-PD1 antagonists in cancer (135). Engagement of PD1 by PDL1 down-regulates effector T cell proliferation and activation, induces T cell cycle arrest and apoptosis, and promotes IL10-producing Treg (136-139). Interestingly, one of the emerging side effect anti-PD1 treatment is T1D140. This suggests that PDL1/PD1 may play an important role in controlling T cell tolerance against β cells. Indeed, in NOD mice PDL1 blockade accelerate T1D in female mice and induce it in male (13). Conversely, PDL1 ectopic expression in syngeneic transplanted islets protects NOD mice against T1D recurrence (12,13). NOD transgenic mice expressing PDL1 under control of the insulin promoter shows delayed incidence in diabetes, reduction T1D incidence, and a systemic, islet specific, T cell anergy (141). In humans, PDL1 polymorphisms is associated with T1D (OR=1.44) (142).

[0073] Given the importance that PDL1 expression might play in controlling T cell reactivity to β cells, we identified saRNAs specific for PDL1 (FIGS. 18). Briefly, putative candidate sequence of small activating RNA for PDL1 were identified by scanning the PDL1 promoter using publically available algorithms. This analysis return more than 200 putative target saRNA target regions. The 95 putative saRNA with higher score were synthetized and tested for their capacity to up-regulate PDL1 by transfecting the human epithelial cell line A549. qRT-PCR was performed 96 hours after transfection and results normalized on the same cell line transfected with scrambled saRNA. 19 saRNAs were found able to upregulate Xiap expression more than 3 times (range 3.01-63.27) over scrambled saRNA (Table 6).

TABLE 6

saRNA sequences to upregulate human PDL1

| Position | fold change | PDL1-saRNA | SEQ ID NO |
|---|---|---|---|
| -261 | 63.2769 | UUUAUCAGAAAGGCGUCCCuu | 394 |
| -583 | 14.1907 | UUAAGGCUGCGGAAGCCUAuu | 395 |
| -739 | 13.0165 | UUGACCUCAAGUGAUCCGCuu | 396 |
| -461 | 11.5844 | GACUUCCUCAAAGUUCCUCuu | 397 |
| -584 | 7.7063 | UAAGGCUGCGGAAGCCUAUuu | 398 |
| -349 | 5.8792 | UAAAAAGUCAGCAGCAGACuu | 399 |
| -353 | 5.2152 | AAGUCAGCAGCAGACCCAUuu | 400 |
| -608 | 5.0249 | GUGAGGGUUAAGAAAGCCCuu | 401 |
| -881 | 4.833 | CUGCAGUUCAAAAUACUGCuu | 402 |
| -637 | 4.1477 | UUUGGGUUAGUGAAUGGGCuu | 403 |
| -683 | 3.9179 | UUUACUUAAGUAUUAUCCCuu | 404 |
| -594 | 3.7109 | GAAGCCUAUUCUAGGUGAGuu | 405 |
| -352 | 3.6316 | AAAGUCAGCAGCAGACCCAuu | 406 |
| -351 | 3.3859 | AAAAGUCAGCAGCAGACCCuu | 407 |
| -609 | 3.3669 | UGAGGGUUAAGAAAGCCCUuu | 408 |
| -713 | 3.3464 | CUAGGUGCUCUCUUUUCUCuu | 409 |
| -636 | 3.28 | CUUUGGGUUAGUGAAUGGGuu | 410 |
| -460 | 3.0587 | UGACUUCCUCAAAGUUCCUuu | 411 |
| -464 | 3.0192 | UUCCUCAAAGUUCCUCGACuu | 412 |

[0074] Next whether the islet-specific-aptamers described herein can effectively deliver PDL1-saRNAs to human islets and upregulate PDL1 expression was tested. Aptamer-PDL1-saRNA chimeras were generated by conjugating aptamer 1-717 to PDL1-saRNA-636 (Table 6) as described in FIG. 12. As shown in FIG. 19A, these PDL1-saRNA/aptamer chimera were added to non-dissociated human islets from cadaveric donor. 48h later, islets were dissociated, labelled with anti-insulin, anti-glucagon and anti-PDL1 antibodies and analyzed by flow cytometry (FIG. 19B). PDL1 expression was evaluated by gating on insulin positive beta cells or glucagon positive alpha cells. While treatment with control chimera does not modify PDL1 expression, treatment with PDL1-saRNA/aptamer significantly upregulate the expression of this important immune modulatory protein on beta cells (FIG. 19B). Interestingly no changes were observed in alpha cells confirming indirectly the preferential binding of this aptamer to beta cells. These proof of principle data indicate that aptamers can be effectively used to deliver functional PDL1-saRNA into human β cells in vitro.

[0075] Next, the ability of PDL1-saRNA/aptamer chimera to upregulate PDL1 in vivo was assessed. As shown in FIG. 20A, immune deficient NSG mice were transplanted in the anterior chamber of the eye with human islets from a cadaveric donor. 3 weeks later, mice were treated with PDL1-saRNA(636)/1-717-aptamer chimera generated as described in FIG. 12 and FIGS. 19. Scramble-saRNA/aptamer chimera was used as control (CTRL chimera). Five days after treatment, PDL1 expression (white) on the islets (dark gray) was quantified by in vivo labelling with anti-PDL1 antibody and in vivo microscopy (FIG. 20B). Summary of PDL1 expression on the engrafted islets at baseline or 5 days after treatment with PDL1-saRNA/aptamer chimera or scrambled-saRNA/aptamer chimera FIG. 20C).

[0076] These results indicated that: i) it is possible to detect PDL1 in human islet cells in vivo, ii) our aptamer chimeras transfect human islets in vivo, and iii) it is possible to upregulate PDL1 in human islets in vivo via aptamer chimera.

### Example 7 - Assess Β Cell Protection From Apoptosis by Aptamer Mediated Xiap Upregulation

[0077] In the first set of experiments, NSG mice will be engrafted with human islets in the ACE. Three weeks after transplant, mice will be treated with Xiap saRNA-aptamer chimera(s) or control chimera. At different time points, human islet grafts will be challenged by intraocular injection of IL1β, TNF-α, and IFNγ to induce apoptosis in β cells via activation of caspase 3 and 7. Caspase 3 and 7 activity will be evaluated in vivo by our intraocular imaging system using CASP3/7 Green Detection Reagent. This cell-permeant reagent consists of a four-amino acid peptide (DEVD) conjugated to a nucleic acid-binding dye. Upon activation, caspase 3 and 7 cleave the probe, allow the dye to bind to the DNA, and emit a bright, fluorogenic signal that can be detected at the cellular level in the ACE28. Additionally, in vivo staining with anti-Annexin V antibodies will be used to directly measured islet cell apoptosis in vivo (FIGS. 7).

[0078] The second set of experiment aims to evaluate the effect of Xiap modulation on anti-islet allo-immunity. Briefly, STZ-diabetic NSG mice will be transplanted with 500 IEQ human islets in the ACE or EFP. 3 weeks later mice will be treated with Xiap chimera(s) or scrambled controls. Treatment will be repeated as determine in Aim2b. One week after the first treatment, mice will receive CFSE labelled human T cells mismatched for HLA to the islet. Without any treatment, the adoptive transfer of allogeneic T cells results in graft loss and return to hyperglycemia within 3 weeks. Thus, we will assess the protective effect of Xiap chimera treatment on the human islet allograft survival using as readouts: i) glycemia, ii) human c-peptide plasma levels and, in the ACE group, iii) the longitudinal evaluation of T cell infiltration and volumetric analysis of engrafted islets as we showed in (77,78).

[0079] To ensure data reproducibility of Xiap chimera effect among individuals, the chimera identified in the EndoC-BH3 cells will be further validated using primary human islets from 6 cadaveric donors; this will provide 88% of power to detect 1.25SD difference from control in one tailed paired t-test. To avoid artifacts, 3 different readout methods (qPCR, western blot, and enzymatic assay) will be used and at least 3 independent repetitions will be performed for each experiment using human islets from 3 different cadaveric donors. In transplantation studies, a total of 9 mice per group (3 in each repetition) will be used to ensure 90% of power (ANOVA, α=0.05) and detect 1.6SD difference to control.

### Example 8 - Optimize the Dose for in Vivo Silencing of P57kip2

[0080] In a first set of experiments, NSG mice transplanted with 500 IEQ human islets in the EFP will be treated i.v. or s.c. with different doses (6, 20, and 60 pmoles/g) of islets-specific aptamers conjugated with p57kip2siRNA or scrambled siRNA (control-chimera) as negative control. We will use adenovirus encoding the same p57kip2 shRNA-transfected islets as positive control (14). At predefined time-points (e.g., day 1, 2, 3, 4, and 5 after administration), grafts will be harvested, and p57kip2 expression quantified by i) qRT-PCR on laser captured islets, and ii) by quantitative computer assisted immunofluorescence analysis95. Both techniques are optimized at the Diabetes Research Institute (96,97) and in the laboratories of the PIs95. To evaluate possible dose-dependent toxicity, sera and organs of interest (spleen, liver, lymph nodes, lung, kidney, and brain) will be collected and sent to the mouse pathology laboratory of University of Miami for histopathological evaluation.

[0081] In the second set of experiments, NSG mice will be transplanted with 500 IEQ human islets in the ACE. Three weeks later, mice will be treated i.v. or by intraocular injection (i.o) with different doses (6, 20, 60pm/g) of our aptamer-chimera loaded with p57kip2 siRNA or AF647-scrambled siRNA (control-chimera) as negative control. In vivo transfection efficiency of the AF647 siRNA will be evaluated with our intraocular imaging system 2, 3, 4, 8, and 24 hours after injection (28). At selected time-points (e.g., 2, 3, 4, and 7 days after treatment), graft will be removed and p57kip2 expression quantified by qRT-PCR on islets explanted from the ACE and by i) qRT-PCR on laser capture islets and ii) by quantitative computer assisted immunofluorescence microscopy analysis (95).

### Example 9 - Optimize Treatment Length and Frequency for Aptamer-Chimera Administration

[0082] Once the optimal dose and route of administration are identified and the kinetics of p57kip2 silencing evaluated, we will determine the number of administrations of p57kip2siRNA-aptamer chimera needed to induce substantial changes (i.e., ≥100% increase) in β cell mass. Since p57kip2 silencing was shown to induce β cell proliferation only in hyperglycemic mice14, sub-marginal human islet mass (250 IEQ) will be transplanted in the EFP or ACE of NSG mice. 21 days after transplant, mice will be rendered hyperglycemic by streptozotocin (STZ) treatment. STZ selectively eliminates mouse islets as human β cells are considerably more resistant (98). Once the mice become hyperglycemic (usually 5-6 days after treatment), mice will receive 1, 2, 3, or 4 administration of islet-specific or control aptamer chimeras. The frequency of the aptamer administration will be determined based on the time course established in Example 5. BrdU will be administered in drinking water for ex vivo determination of proliferation. β cell mass in the EPF group will be evaluated longitudinally (baseline, during treatment, 5 and 10 days after the last treatment) by IVIS (FIGS. 2). In the ACE group, islets mass will be evaluated by in vivo imaging and quantitative analysis of islet volume (28). Ten days after the last treatment, grafts will be harvested and analyzed by immunostaining to determine (i) β cell proliferation via BrdU and Ki76 staining and (ii) α to β cell ratio.

### Example 10 - Determine if Aptamer Mediated Silencing Can Restore Normoglycemia in Diabetic Mice Transplanted With Sub-Marginal Islet Mass

[0083] The purpose of this Example is to test if aptamer mediated p57kip2 silencing can restore normoglycemia in diabetic mice transplanted with suboptimal number of human islets.

[0084] In the first set of experiments, STZ-diabetic NSG mice maintained on insulin therapy (s.c pellet implant for sustained insulin release) will be transplanted with different quantities of human islets (50, 150, 350 IEQ) in the ACE. Three weeks later, insulin pellets will be removed, and mice will be treated with p57kip2siRNA-aptamer chimera or scrambled control, locally or systemically. To compare this treatment with today gold standard for islets transfection, two additional groups of mice will be treated locally with adenoviral vector encoding for p57kip2shRNA or RFP as control. Pilot experiments using RFP encoding adenovirus will be performed in the ACE to determine the minimal dose necessary for transducing at least 90% of the islets. Transduction efficiency will be quantified using our in vivo imaging system (28). In the experimental groups (which received 50, 150, and 350 IEQ), blood glucose will be used as readout for treatment efficacy in addition to intravital imaging and volume analysis of the ACE islet grafts. The varied sub-marginal islet mass in the different groups may also reveal the degree of the hyperglycemic drive on human islet proliferation.

[0085] In the second set of experiments, STZ-diabetic mice will be transplanted in the EFP with the same sub-marginal human islet masses (50, 150, 350 IEQ) and maintained on insulin during the engraftment period. 3 weeks later insulin pellet will be removed and mice will be treated with p57kip2siRNA-aptamer chimera or the scrambled control. We will monitor glycemia and β cell mass by IVIS longitudinally as readouts.

[0086] In both sets of experiments, glucose tolerance tests (GTTs) will be performed in mice with restored normoglycemia to further evaluate the islet function under stress conditions.

[0087] To ensure reproducibility in the results, at least 3 independent repetitions will be performed for each experiment using human islets from 3 different cadaveric donors. The use a total of 9 mice per experimental group (3 in each repetition) gives 90% of power (One way ANOVA, α=0.05) to detect an effect size of 1.6SD to control. 12 mice per group will be used to accounting for the higher expected variation of the read-out. To minimize readout-specific artifacts, the same phenomenon will be measured with at least 2 independent methods.

### REFERENCES CITED

[0088] 1 Roep, B. O. Diabetes 65, 545-547,(2016).
[0089] 2 VanBuecken, et al., Pediatric diabetes 15, 84-90, (2014).
[0090] 3 Keenan et al.,Joslin Medalist Study. Diabetes 59, 2846-2853, (2010).
[0091] 4 Liu et al.,Diabetologia 52, 1369-1380, (2009).
[0092] 5 Rother, et al., Diabetes Care 32, 2251-2257, (2009).
[0093] 6 Wang et al., Diabetes Care 35, 465-470, (2012).
[0094] 7 Oram et al.,Diabetologia 57, 187-191, (2014).
[0095] 8 Potter et al.,Diabetes 63, 12-19, (2014).
[0096] 9 Shapiro et al.,Nat Rev Endocrinol advance online publication, doi:10.1038/nrendo.2016.178 (2016).
[0097] 10 Mehrotra et al.,IET nanobiotechnology / IET 9, 386-395, doi:10.1049/iet-nbt.2015.0018 (2015).
[0098] 11 Wu et al.,Mol Pharm 7, 1655-1666, doi:10.1021/mp100070j (2010).
[0099] 12 Li, et al.,Diabetes 64, 529-540, doi:10.2337/db13-1737 (2015).
[0100] 13 Ansari, et al.,J Exp Med 198, 63-69, doi:10.1084/jem.20022125 (2003).
[0101] 14 Avrahami, et al., J Clin Invest 124, 670-674, doi:10.1172/JCI69519 (2014).
[0102] 15 Ng, et al., Nat Rev Drug Discov 5, 123-132, doi:10.1038/nrd1955 (2006).
[0103] 16 Alagia, A. & Eritja, R. siRNA and RNAi optimization. Wiley interdisciplinary reviews. RNA, doi:10.1002/wrna.1337 (2016).
[0104] 17 Abe, et al.,Folia pharmacologica Japonica 147, 362-367, doi:10.1254/fpj.147.362 (2016).
[0105] 18 Bandello, et al., Current pharmaceutical design 21, 4731-4737 (2015).
[0106] 19 Camorani, et al., Central nervous system agents in medicinal chemistry 15, 126-137 (2015).
[0107] 20 Kanwar, et al.,Current medicinal chemistry 22, 2539-2557 (2015).
[0108] 21 Lao, et al., ACS nano 9, 2235-2254, (2015).
[0109] 22 Lee, et al., BMB reports 48, 234-237 (2015).
[0110] 23 Woodruff, et al.,Arteriosclerosis, thrombosis, and vascular biology 35, 2083-2091, (2015).
[0111] 24 Yu, Y. et al., International journal of molecular sciences 17, 358, (2016).
[0112] 25 Vater, A. et al., The Journal of Biological Chemistry 288, 21136-21147, (2013).
[0113] 26 Zheng, et al., Cancer Lett 355, 18-24, doi:10.1016/j.canlet.2014.09.004 (2014).
[0114] 27 Berman, D. M. et al., Diabetes 65, 1350-1361, (2016).
[0115] 28 Abdulreda, M. H. et al., Proc Natl Acad Sci U S A 108, 12863-12868, doi:10.1073/pnas.1105002108 (2011).
[0116] 29 Abdulreda, et al., J Vis Exp, e50466, (2013).
[0117] 30 Miska, J. et al., J Exp Med 211, 441-456, (2014).
[0118] 31 Hu, P. P. Recent Advances in Aptamers Targeting Immune System. Inflammation, doi:10.1007/s10753-016-0437-9 (2016).
[0119] 32 Parashar, A., J Clin Diagn Res 10, Be01-06, (2016).
[0120] 33 Qu, J. et al., Cell Mol Life Sci, doi:10.1007/s00018-016-2345-4 (2016).
[0121] 34 Sullenger, et al., Science 352, 1417-1420, (2016).
[0122] 35 Thiel, W. H. et al., PLoS One 7, e43836, doi:10.1371/journal.pone.0043836 (2012).
[0123] 36 Magalhaes, et al., Mol Ther 20, 616-624, (2012).
[0124] 37 Farokhzad, et al., Cancer Research 64, 7668-7672 (2004).
[0125] 38 Chu, et al., Nucleic Acids Res 34, e73, (2006).
[0126] 39 McNamara, et al., Nat Biotechnol 24, 1005-1015, (2006).
[0127] 40 Caroli, et al., Bioinformatics 32, 161-164, (2016).
[0128] 41 Ulrich, et al., Cytometry A 59, 220-231, (2004).
[0129] 42 Zhu, G. et al. Chem Commun (Camb) 48, 10472-10480, (2012).
[0130] 43 Zhou, et al., Front Genet 3, 234, (2012).
[0131] 44 Bagalkot et al., Angew Chem Int Ed Engl 45, 8149-8152 (2006).
[0132] 45 Huang, et al.,Chembiochem 10, 862-868, (2009).
[0133] 46 Taghdisi, et al., J Drug Target 18, 277-281, (2010).
[0134] 47 Farokhzad, et al., Proc Natl Acad Sci U S A 103, 6315-6320, (2006).
[0135] 48 Dhar et al., Proc Natl Acad Sci U S A 105, 17356-17361, (2008).
[0136] 49 Gu, et al., Proc Natl Acad Sci U S A 105, 2586-2591, (2008).
[0137] 50 Cao, et al., Angew Chem Int Ed Engl 48, 6494-6498, (2009).
[0138] 51 Kang, et al., Chem Commun (Camb) 46, 249-251, (2010).
[0139] 52 Zhang, et al., ChemMedChem 2, 1268-1271, (2007).
[0140] 53 Huang, et al., Anal Chem 80, 567-572, (2008).
[0141] 54 Javier, et al., Bioconjug Chem 19, 1309-1312, (2008).
[0142] 55 Li, et al., Chem Commun (Camb) 46, 392-394, (2010).
[0143] 56 Guo, P., J Nanosci Nanotechnol 5, 1964-1982 (2005).
[0144] 57 Guo, et al., Hum Gene Ther 16, 1097-1109, (2005).
[0145] 58 Wullner, et al., Curr Cancer Drug Targets 8, 554-565 (2008).
[0146] 59 Zhou, et al., Mol Ther 16, 1481-1489, (2008).
[0147] 60 Dassie, et al., Nat Biotechnol 27, 839-849, (2009).
[0148] 61 Zhou, et al., Curr Top Med Chem 9, 1144-1157 (2009).
[0149] 62 Pastor, et al., Nature 465, 227-230, (2010).
[0150] 63 Wheeler, et al., J Clin Invest 121, 2401-2412, (2011).
[0151] 64 Wheeler, et al., Mol Ther 21, 1378-1389, (2013).
[0152] 65 Neff, et al., Science translational medicine 3, 66ra66, (2011).
[0153] 66 Zhou, et al., Mol Ther 21, 192-200, (2013).
[0154] 67 Subramanian, et al., Nucleic acid therapeutics, (2015).
[0155] 68 Zhou, et al., Methods Mol Biol 1297, 169-185, (2015).
[0156] 69 Hao, et al., Drug delivery, 1-8, (2015).
[0157] 70 Gilboa-Geffen et al., Mol Cancer Ther 14, 2279-2291, (2015).
[0158] 71 Song, P. et al. Biochem Biophys Res Commun 452, 1040-1045, (2014).
[0159] 72 Lai, et al., Biomaterials 35, 2905-2914, (2014).
[0160] 73 Hu et al., Nucleic acids 3, e209, (2014).
[0161] 74 Herrmann, et al., J Clin Invest 124, 2977-2987, (2014).
[0162] 75 Bruno, J. G., Molecules (Basel, Switzerland) 20, 6866-6887, (2015).
[0163] 76 Abdulreda, et al., Proc Natl Acad Sci U S A, 108, 12863-12868, (2011).
[0164] 77 Ilegems et al., Proc Natl Acad Sci U S A, doi:10.1073/pnas.1313696110 (2013).
[0165] 78 Almaca, et al. Proc Natl Acad Sci U S A, doi:10.1073/pnas.1414053111 (2014).
[0166] 79 Becker, et al.,. J Biol Chem 269, 21234-21238 (1994).
[0167] 80 Flotte, et al., Diabetes 50, 515-520 (2001).
[0168] 81 Yang, et al., Pharm Res 19, 968-975 (2002).
[0169] 82 Loiler, et al., Gene Ther 10, 1551-1558, (2003).
[0170] 83 Bain, et al., Diabetes 53, 2190-2194 (2004).
[0171] 84 Hanayama, et al., Cell Medicine 8, 31-38, (2015).
[0172] 85 Thomas, et al., Nat Rev Genet 4, 346-358, (2003).
[0173] 86 Bottino, et al., Gene Ther 10, 875-889, (2003).
[0174] 87 Giannoukakis, et al., American journal of therapeutics 12, 512-528 (2005).
[0175] 88 Jimenez-Moreno, et al., Curr Gene Ther 15, 436-446 (2015).
[0176] 89 Mehta, N., Stone, J. & Whitelaw, A. Practical management of hyperinsulinism in infancy. Archives of disease in childhood. Fetal and neonatal edition 84, F218 (2001).
[0177] 90 Menni, et al., Pediatrics 107, 476-479 (2001).
[0178] 91 de Lonlay, et al., J Clin Invest 100, 802-807, (1997).
[0179] 92 Kassem, et al., Diabetes 50, 2763-2769, (2001).
[0180] 93 dilorio, et al., Pancreas 40, 1147-1149, (2011).
[0181] 94 Bornello, et al., Molecular Cancer Research 9, 1269-1284, (2011).
[0182] 95 Kassem, et al., Diabetes 50, 2763 (2001).
[0183] 96 Zhang, et al., J Proteomics 150, 149-159, (2017).
[0184] 97 Richardson, et al., Diabetologia 59, 2448-2458, (2016).
[0185] 98 Yang et al., Endocrinology 143, 2491-2495, (2002).
[0186] 99 Mathis, et al.,Nature 414, 792-798, (2001).
[0187] 100 Butler, et al., Diabetologia 50, 2323-2331, (2007).
[0188] 101 Meier, et al., Diabetologia 48, 2221-2228, (2005).
[0189] 102 Hui, et al., Journal of Cellular Physiology 200, 177-200, (2004).
[0190] 103 Turley, et al., The Journal of Experimental Medicine 198, 1527-1537, (2003).
[0191] 104 Viste, et al., Transplant Proc 22, 808-809 (1990).
[0192] 105 Deng, et al., Transplant Proc 29, 2062-2063 (1997).
[0193] 106 Hughes, et al., Current diabetes reviews 6, 274-284 (2010).
[0194] 107 Bellin, et al., Ann Surg 261, 21-29, (2015).
[0195] 108 Lazard,et al., Diabetes/metabolism research and reviews 28, 475-484, (2012).
[0196] 109 Emamaullee, et al., Am J Transplant 5, 1297-1305, (2005).
[0197] 110 Plesner, et al., Diabetes 54, 2533-2540 (2005).
[0198] 111 Emamaullee, et al., Diabetes 54, 2541-2548 (2005).
[0199] 112 Li, et al., Proc Natl Acad Sci U S A 103, 17337-17342, (2006).
[0200] 113 Huang, et al., PLoS One 5, e8848, (2010).
[0201] 114 Janowski, et al., Nature chemical biology 3, 166-173, (2007).
[0202] 115 Kosaka, et al., Nucleic acid therapeutics 22, 335-343, (2012).
[0203] 116 Pan, et al., Gene 527, 102-108, (2013).
[0204] 117 Sakurai, et al., Cancer Gene Ther 21, 164-170, (2014).
[0205] 118 Ren, et al., Prostate 73, 1591-1601, (2013).
[0206] 119 Turner, et al., Cell Cycle 13, 772-781, (2014).
[0207] 120 Wang, et al., Cancer Res 70, 10182-10191, (2010).
[0208] 121 Wang, et al., Biochem J 443, 821-828, (2012).
[0209] 122 Qin, et al., World journal of surgical oncology 10, 11, (2012).
[0210] 123 Meng, et al., Nucleic Acids Research 44, 2274-2282, (2016).
[0211] 124 Schwartz, et al., Nature structural & molecular biology 15, 842-848, (2008).
[0212] 125 Weinberg, et al., Nucleic Acids Res 35, 7303-7312, (2007).
[0213] 126 Guo, et al., RNA biology 11, 1221-1225, (2014).
[0214] 127 Chen, et al., The journal of sexual medicine 8, 2773-2780, (2011).
[0215] 128 Chen, et al., Mol Cancer Ther 7, 698-703, (2008).
[0216] 129 Dong, et al., Yonsei Med J 55, 324-330, (2014).
[0217] 130 Yang, et al., Int J Biochem Cell Biol 45, 1338-1346, (2013).
[0218] 131 Chu, et al., Nucleic Acids Res 38, 7736-7748, (2010).
[0219] 132 Benazra, et al., Molecular metabolism 4, 916-925, (2015).
[0220] 133 Weiret al., The Journal of Clinical Investigation 121, 3395-3397, (2011).
[0221] 134 Brehm, et al., Cold Spring Harbor Perspectives in Medicine 2, a007757, (2012).
[0222] 135 Hughes, et al., Trends Immunol 37, 462-476, (2016).
[0223] 136 Pardoll, et al., Semin Oncol 42, 523-538, (2015).
[0224] 137 Francisco, et al., Immunological reviews 236, 219-242, (2010).
[0225] 138 Keir, et al., J Immunol 179, 5064-5070 (2007).
[0226] 139 Lee, et al., J Immunol 171, 6929-6935 (2003).
[0227] 140 Hughes, et al., Diabetes Care 38, e55-57, (2015).
[0228] 141 Wang, et al., Diabetes 57, 1861-1869, (2008).
[0229] 142 Pizarro, et al., Diabetes/metabolism research and reviews 30, 761-766, (2014).
[0230] 143 Goldman, et al., Br J Haematol 103, 335-342 (1998).
[0231] 144 Mazurier, et al., J Interferon Cytokine Res 19, 533-541 (1999).
[0232] 145 Ito, et al., Blood 100, 3175-3182 (2002).
[0233] 146 Ishikawa, et al., Blood 106, 1565-1573 (2005).
[0234] 147 Berges, et al., Virology 373, 342-351 (2008).
[0235] 148 Brainard, et al., Virol 83, 7305-7321 (2009).
[0236] 149 Brehm, et al., Clin Immunol 135, 84-98.
[0237] 150 Gorantla,et al., J Immunol 184, 7082-7091.
[0238] 151 Gorantla, et al., J Virol 79, 2124-2132 (2005).
[0239] 152 Joseph, et al.,J Virol 84, 6645-6653.
[0240] 153 Kumar, et al., Cell 134, 577-586 (2008).
[0241] 154 Lepus et al., Hum Immunol 70, 790-802, (2009).
[0242] 155 Mukherjee, et al., Mol Ther 18, 803-811.
[0243] 156 Nakata, et al., J Virol 79, 2087-2096 (2005).
[0244] 157 Rajesh, et al., Hum Immunol 71, 551-559.
[0245] 158 Sato, et al., Vaccine 28 Suppl 2, B32-37.
[0246] 159 Watanabe, et al., Blood 109, 212-218 (2007).
[0247] 160 Akkina, et al., PLoS One 6, e20169, (2011).
[0248] 161 Gonzalez, et al., Immunol Res 57, 326-334, (2013).
[0249] 162 Shultz, et al., J Immunol 174, 6477-6489 (2005).
[0250] 163 Giannelli, et al., Cytometry B Clin Cytom 74, 349-355 (2008).
[0251] 164 Shapiro, et al., Diabetologia 45, 224-230, (2002).
[0252] 165 Borrello, et al., Blood 114, 1736 (2009).
[0253] 166 Serafini,et al., Cancer Res 64, 6337-6343, (2004).
[0254] 167 Strbo, et al., Am J Reprod Immunol 59, 407-416, (2008).
[0255] 168 Armitage P, B. G., and Matthews J N.. Statistical Methods in Medical Research, Fourth Edition., (Blackwell Scientific, 2001).
[0256] 169 Brown H, P., R. Applied Mixed Models in Medicine. (Wiley, 1999).
[0257] 170 Hosmer DW, L. S. Applied Logistic Regression, 2nd edition. (Wiley, 2000).
[0258] 171 Machin D, C. Y., and Parmar MKB.. Survival Analysis: A Practical Approach. Second Edition. (John Wiley & Sons, 2006).

What is claimed is:

1. A method of measuring beta cell mass comprising contacting the beta cell with a construct comprising an aptamer conjugated to an imaging reagent in an amount effective to measure the mass of the beta cell.

2. The method of claim 1, wherein the aptamer is M12-3773 or 1-717.

3. The method of claim 1, wherein the imaging agent is a fluorochrome, a PET tracer or a MRI contrast reagent.

4. The method of claim 1, wherein the aptamer is conjugated to the imaging reagent via chelators.

5-16. (canceled)

17. An aptamer comprising the nucleotide sequence set forth in SEQ ID NO: 264 or SEQ ID NO: 259.

18. (canceled)

19. A construct comprising the aptamer of claim 17 conjugated to a saRNA.

20. The construct of claim 19, wherein the saRNA upregulates the protein XIAP (X-linked inhibitor of apoptosis gene id 331) or the protein CD274 (Programmed death-ligand 1, PDL1, gene id 29126)..

21. (canceled)

22. A construct comprising an aptamer conjugated to a small activating RNA (saRNA).

23. The construct of claim 22, wherein the aptamer is specific for a tissue.

24. The construct of claim 23, wherein the tissue is from an organ.

25. The construct of claim 24, wherein the organ is pancreas, heart, lung, kidney, stomach, skin or brain.

26. The construct of claim 23, wherein the tissue is pancreatic islets.

27. The construct of claim 22, wherein the construct further comprises a detectable label.

28. The construct of claim 27, wherein the detectable label is a fluorochrome, Positron emission tomography tracer such as Fluorine-18, oxygen-15, gallium 68, magnetic resonance imaging contrast agents such as gadolinium, iron oxide, iron platinum or manganese.

29. The construct of claim 22, wherein the aptamer is M12-3773 or 1-717.

30. The construct of claim 22, wherein the aptamer is specific for clusterin (CLU, gene id 1191).

31. The construct of claim 22, wherein the aptamer is specific for “Transmembrane emp24 domain-containing protein 6” (TMED6, gene id 146456).

32. The construct of claim 22, wherein the tissue is adrenal tissue,bone marrow, breast tissue, lung tissue or lymph node tissue, brain cerebellum, is brain cerebral cortex tissue, pituitary tissue, colon tissue, endothelium tissue, esophaqus tissue, heart tissue, kidney tissue, fallopian tube tissue, liver tissue, ovarian tissue, placenta tissue, prostate tissue, spinal cord tissue, testis tissue, thymus tissue, thyroid tissue, ureter tissue, cervical tissue, islets of Langerhans or pancreatic tissue.

33. The construct of claim 32, wherein the aptamer is
(a) 173-2273, 107-901 or m6-3239;
(b) 107-901 or m6-3239;
(c) 173-2273, 107-901, m1-2623 or m6-3239;
(d) 107-901, m1-2623 or m6-3239;
(e) m6-3239;
(f) 166-279, 107-901, m1-2623 or m6-3239;
(g) 107-901;
(h) 166-270, 173-2273, 107-901, m1-2623 or m6-3239;
(i) 173-2273 or 107-901;
(j) 166-279 or 173-2273;
(k) 166-279, 173-2273, 107-901, m1-2623, m6-3239 and m12-3773;
(l) 173-2273, 107-901 or mf-2623;
(m) m1-2623;
(n) 166-279; or
(o) 166-279, 173-2273, 107-901, 1-717, m1-2623, m6-3239 or m12-3773 .

34-64. (canceled)

The application's sequence listing, which the Patent Office published only in electronic form, follows.

SEQUENCE LISTING (416 sequences)

SEQ ID NO: 1 - DNA, 86 bp, synthetic construct
  misc_feature 1..86: note = Synthetic Polynucleotide
  source 1..86: mol_type = other DNA
  modified_base 9: mod_base = OTHER; note = Uracil
  modified_base 14: mod_base = OTHER; note = Uracil
  modified_base 23..25: mod_base = OTHER; note = Uracil
  modified_base 28: mod_base = OTHER; note = Uracil
  modified_base 31: mod_base = OTHER; note = Uracil
  modified_base 34: mod_base = OTHER; note = Uracil
  modified_base 38: mod_base = OTHER; note = Uracil
  modified_base 43: mod_base = OTHER; note = Uracil
  modified_base 48..49: mod_base = OTHER; note = Uracil
  modified_base 54..55: mod_base = OTHER; note = Uracil
  modified_base 61: mod_base = OTHER; note = Uracil
  modified_base 70: mod_base = OTHER; note = Uracil
  modified_base 74: mod_base = OTHER; note = Uracil
  modified_base 80: mod_base = OTHER; note = Uracil
ggaggagctacgatgcggccgatttcgtcatcctccataccatcgccttaccgttccgcgtcagacgactcgctgaggatccgaca

SEQ ID NO: 2 - DNA, 85 bp, synthetic construct
  misc_feature 1..85: note = Synthetic Polynucleotide
  source 1..85: mol_type = other DNA
  modified_base 9: mod_base = OTHER; note = Uracil
  modified_base 14: mod_base = OTHER; note = Uracil
  modified_base 22: mod_base = OTHER; note = Uracil
  modified_base 24: mod_base = OTHER; note = Uracil
  modified_base 28: mod_base = OTHER; note = Uracil
  modified_base 30: mod_base = OTHER; note = Uracil
  modified_base 33: mod_base = OTHER; note = Uracil
  modified_base 38: mod_base = OTHER; note = Uracil
  modified_base 49: mod_base = OTHER; note = Uracil
  modified_base 51: mod_base = OTHER; note = Uracil
  modified_base 53: mod_base = OTHER; note = Uracil
  modified_base 57: mod_base = OTHER; note = Uracil
  modified_base 69: mod_base = OTHER; note = Uracil
  modified_base 73: mod_base = OTHER; note = Uracil
  modified_base 79: mod_base = OTHER; note = Uracil
ggaggagctacgatgcggccgtctcgctctcatcccatgcacgaaacctctctcactgcacagacgactcgctgaggatccgaca

SEQ ID NO: 3 - DNA, 85 bp, synthetic construct
  misc_feature 1..85: note = Synthetic Polynucleotide
  source 1..85: mol_type = other DNA
  modified_base 9: mod_base = OTHER; note = Uracil
  modified_base 14: mod_base = OTHER; note = Uracil
  modified_base 19: mod_base = OTHER; note = Uracil
  modified_base 23..24: mod_base = OTHER; note = Uracil
  modified_base 26..27: mod_base = OTHER; note = Uracil
  modified_base 35..37: mod_base = OTHER; note = Uracil
  modified_base 39: mod_base = OTHER; note = Uracil
  modified_base 42: mod_base = OTHER; note = Uracil
  modified_base 44..45: mod_base = OTHER; note = Uracil
  modified_base 54: mod_base = OTHER; note = Uracil
  modified_base 57: mod_base = OTHER; note = Uracil
  modified_base 69: mod_base = OTHER; note = Uracil
  modified_base 73: mod_base = OTHER; note = Uracil
  modified_base 79: mod_base = OTHER; note = Uracil
ggaggagctacgatgcggtgaattcttccggcactttgtcatcttcacccccatgctgcacagacgactcgctgaggatccgaca

SEQ ID NO: 4 - DNA, 86 bp, synthetic construct
  misc_feature 1..86: note = Synthetic Polynucleotide
  source 1..86: mol_type = other DNA
  modified_base 9: mod_base = OTHER; note = Uracil
  modified_base 23..25: mod_base = OTHER; note = Uracil
  modified_base 14: mod_base = OTHER; note = Uracil
  modified_base 28: mod_base = OTHER; note = Uracil
  modified_base 31: mod_base = OTHER; note = Uracil
  modified_base 34: mod_base = OTHER; note = Uracil
  modified_base 38: mod_base = OTHER; note = Uracil
  modified_base 43: mod_base = OTHER; note = Uracil
  modified_base 48: mod_base = OTHER; note = Uracil
  modified_base 54..55: mod_base = OTHER; note = Uracil
  modified_base 61: mod_base = OTHER; note = Uracil
  modified_base 70: mod_base = OTHER; note = Uracil
  modified_base 74: mod_base = OTHER; note = Uracil
  modified_base 80: mod_base = OTHER; note = Uracil
ggaggagctacgatgcggccgatttcgtcatcctccataccatcgcctcaccgttccgcgtcagacgactcgctgaggatccgaca

SEQ ID NO: 5 - DNA, 86 bp, synthetic construct
  misc_feature 1..86: note = Synthetic Polynucleotide
  source 1..86: mol_type = other DNA
  modified_base 9: mod_base = OTHER; note = Uracil
  modified_base 14: mod_base = OTHER; note = Uracil
  modified_base 23..25: mod_base = OTHER; note = Uracil
  modified_base 28: mod_base = OTHER; note = Uracil
  modified_base 31: mod_base = OTHER; note = Uracil
  modified_base 34: mod_base = OTHER; note = Uracil
  modified_base 43: mod_base = OTHER; note = Uracil
  modified_base 48..49: mod_base = OTHER; note = Uracil
  modified_base 54..55: mod_base = OTHER; note = Uracil
  modified_base 61: mod_base = OTHER; note = Uracil
  modified_base 70: mod_base = OTHER; note = Uracil
  modified_base 74: mod_base = OTHER; note = Uracil
  modified_base 80: mod_base = OTHER; note = Uracil
ggaggagctacgatgcggccgatttcgtcatcctccacaccatcgccttaccgttccgcgtcagacgactcgctgaggatccgaca

SEQ ID NO: 6 - DNA, 86 bp, synthetic construct
  misc_feature 1..86: note = Synthetic Polynucleotide
  source 1..86: mol_type = other DNA
  modified_base 9: mod_base = OTHER; note = Uracil
  modified_base 14: mod_base = OTHER; note = Uracil
  modified_base 23..25: mod_base = OTHER; note = Uracil
  modified_base 28: mod_base = OTHER; note = Uracil
  modified_base 31: mod_base = OTHER; note = Uracil
  modified_base 34: mod_base = OTHER; note = Uracil
  modified_base 38: mod_base = OTHER; note = Uracil
  modified_base 43: mod_base = OTHER; note = Uracil
  modified_base 48..49: mod_base = OTHER; note = Uracil
  modified_base 54..55: mod_base = OTHER; note = Uracil
  modified_base 61: mod_base = OTHER; note = Uracil
  modified_base 70: mod_base = OTHER; note = Uracil
  modified_base 74: mod_base = OTHER; note = Uracil
  modified_base 80: mod_base = OTHER; note = Uracil
ggaggagctacgatgcggccgatttcgtcatcctccgtaccatcgccttaccgttccgcgtcagacgactcgctgaggatccgaca

SEQ ID NO: 7 - DNA, 86 bp, synthetic construct
  misc_feature 1..86: note = Synthetic Polynucleotide
  source 1..86: mol_type = other DNA
  modified_base 9: mod_base = OTHER; note = Uracil
  modified_base 14: mod_base = OTHER; note = Uracil
  modified_base 23: mod_base = OTHER; note = Uracil
  modified_base 27: mod_base = OTHER; note = Uracil
  modified_base 34: mod_base = OTHER; note = Uracil
  modified_base 36..37: mod_base = OTHER; note = Uracil
  modified_base 47: mod_base = OTHER; note = Uracil
  modified_base 50..51: mod_base = OTHER; note = Uracil
  modified_base 53..55: mod_base = OTHER; note = Uracil
  modified_base 61: mod_base = OTHER; note = Uracil
  modified_base 70: mod_base = OTHER; note = Uracil
  modified_base 74: mod_base = OTHER; note = Uracil
  modified_base 80: mod_base = OTHER; note = Uracil
ggaggagctacgatgcggcccatcactcccgcgtattgcgaacgcatcgttatttagccgtcagacgactcgctgaggatccgaca

SEQ ID NO: 8 - DNA, 86 bp, synthetic construct
  misc_feature 1..86: note = Synthetic Polynucleotide
  source 1..86: mol_type = other DNA
  modified_base 9: mod_base = OTHER; note = Uracil
  modified_base 14: mod_base = OTHER; note = Uracil
  modified_base 19: mod_base = OTHER; note = Uracil
  modified_base 23..25: mod_base = OTHER; note = Uracil
  modified_base 28: mod_base = OTHER; note = Uracil
  modified_base 31: mod_base = OTHER; note = Uracil
  modified_base 34: mod_base = OTHER; note = Uracil
  modified_base 38: mod_base = OTHER; note = Uracil
  modified_base 43: mod_base = OTHER; note = Uracil
  modified_base 48..49: mod_base = OTHER; note = Uracil
  modified_base 54..55: mod_base = OTHER; note = Uracil
  modified_base 61: mod_base = OTHER; note = Uracil
  modified_base 70: mod_base = OTHER; note = Uracil
  modified_base 74: mod_base = OTHER; note = Uracil
  modified_base 80: mod_base = OTHER; note = Uracil
ggaggagctacgatgcggtcgatttcgtcatcctccataccatcgccttaccgttccgcgtcagacgactcgctgaggatccgaca

SEQ ID NO: 9 - DNA, 86 bp, synthetic construct
  misc_feature 1..86: note = Synthetic Polynucleotide
  source 1..86: mol_type = other DNA
  modified_base 9: mod_base = OTHER; note = Uracil
  modified_base 14: mod_base = OTHER; note = Uracil
  modified_base 23..25: mod_base = OTHER; note = Uracil
  modified_base 28: mod_base = OTHER; note = Uracil
  modified_base 31: mod_base = OTHER; note = Uracil
  modified_base 34: mod_base = OTHER; note = Uracil
  modified_base 38: mod_base = OTHER; note = Uracil
  modified_base 43: mod_base = OTHER; note = Uracil
  modified_base 46: mod_base = OTHER; note = Uracil
  modified_base 48..49: mod_base = OTHER; note = Uracil
  modified_base 54..55: mod_base = OTHER; note = Uracil
  modified_base 61: mod_base = OTHER; note = Uracil
  modified_base 70: mod_base = OTHER; note = Uracil
  modified_base 74: mod_base = OTHER; note = Uracil
  modified_base 80: mod_base = OTHER; note = Uracil
ggaggagctacgatgcggccgatttcgtcatcctccataccatcgtcttaccgttccgcgtcagacgactcgctgaggatccgaca

SEQ ID NO: 10 - DNA, 86 bp, synthetic construct
  misc_feature 1..86: note = Synthetic Polynucleotide
  source 1..86: mol_type = other DNA
  modified_base 9: mod_base = OTHER; note = Uracil
  modified_base 14: mod_base = OTHER; note = Uracil
  modified_base 23..25: mod_base = OTHER; note = Uracil
  modified_base 28: mod_base = OTHER; note = Uracil
  modified_base 31: mod_base = OTHER; note = Uracil
  modified_base 34: mod_base = OTHER; note = Uracil
  modified_base 38: mod_base = OTHER; note = Uracil
  modified_base 43: mod_base = OTHER; note = Uracil
  modified_base 48..49: mod_base = OTHER; note = Uracil
  modified_base 55: mod_base = OTHER; note = Uracil
  modified_base 61: mod_base = OTHER; note = Uracil
  modified_base 70: mod_base = OTHER; note = Uracil
  modified_base 74: mod_base = OTHER; note = Uracil
  modified_base 80: mod_base = OTHER; note = Uracil
ggaggagctacgatgcggccgatttcgtcatcctccataccatcgccttaccgctccgcgtcagacgactcgctgaggatccgaca

SEQ ID NO: 11 - DNA, 86 bp, synthetic construct
  misc_feature 1..86: note = Synthetic Polynucleotide
  source 1..86: mol_type = other DNA
  modified_base 9: mod_base = OTHER; note = Uracil
  modified_base 14: mod_base = OTHER; note = Uracil
  modified_base 23..25: mod_base = OTHER; note = Uracil
  modified_base 28: mod_base = OTHER; note = Uracil
  modified_base 31: mod_base = OTHER; note = Uracil
  modified_base 34: mod_base = OTHER; note = Uracil
  modified_base 38: mod_base = OTHER; note = Uracil
  modified_base 43: mod_base = OTHER; note = Uracil
  modified_base 48..49: mod_base = OTHER; note = Uracil
  modified_base 54..55: mod_base = OTHER; note = Uracil
  modified_base 61: mod_base = OTHER; note = Uracil
  modified_base 70: mod_base = OTHER; note = Uracil
  modified_base 74: mod_base = OTHER; note = Uracil
  modified_base 80: mod_base = OTHER; note = Uracil
ggaggagctacgatgcggccgatttcgtcatcctccatgccatcgccttaccgttccgcgtcagacgactcgctgaggatccgaca

SEQ ID NO: 12 - DNA, 86 bp, synthetic construct
  misc_feature 1..86: note = Synthetic Polynucleotide
  source 1..86: mol_type = other DNA
  modified_base 9: mod_base = OTHER; note = Uracil
  modified_base 14: mod_base = OTHER; note = Uracil
  modified_base 23..25: mod_base = OTHER; note = Uracil
  modified_base 28: mod_base = OTHER; note = Uracil
  modified_base 31: mod_base = OTHER; note = Uracil
  modified_base 34: mod_base = OTHER; note = Uracil
  modified_base 38: mod_base = OTHER; note = Uracil
  modified_base 43: mod_base = OTHER; note = Uracil
  modified_base 49: mod_base = OTHER; note = Uracil
  modified_base 54..55: mod_base = OTHER; note = Uracil
  modified_base 61: mod_base = OTHER; note = Uracil
  modified_base 70: mod_base = OTHER; note = Uracil
  modified_base 74: mod_base = OTHER; note = Uracil
  modified_base 80: mod_base = OTHER; note = Uracil
ggaggagctacgatgcggccgatttcgtcatcctccataccatcgccctaccgttccgcgtcagacgactcgctgaggatccgaca

SEQ ID NO: 13 - DNA, 86 bp, synthetic construct
  misc_feature 1..86: note = Synthetic Polynucleotide
  source 1..86: mol_type = other DNA
  modified_base 9: mod_base = OTHER; note = Uracil
  modified_base 14: mod_base = OTHER; note = Uracil
  modified_base 23..25: mod_base = OTHER; note = Uracil
  modified_base 28: mod_base = OTHER; note = Uracil
  modified_base 31: mod_base = OTHER; note = Uracil
  modified_base 34: mod_base = OTHER; note = Uracil
  modified_base 38: mod_base = OTHER; note = Uracil
  modified_base 43: mod_base = OTHER; note = Uracil
  modified_base 48..49: mod_base = OTHER; note = Uracil
  modified_base 54..55: mod_base = OTHER; note = Uracil
  modified_base 61: mod_base = OTHER; note = Uracil
  modified_base 70: mod_base = OTHER; note = Uracil
  modified_base 74: mod_base = OTHER; note = Uracil
  modified_base 80: mod_base = OTHER; note = Uracil
ggaggagctacgatgcggccgatttcgtcatcctccataccatcgccttgccgttccgcgtcagacgactcgctgaggatccgaca

SEQ ID NO: 14 - DNA, 86 bp, synthetic construct
  misc_feature 1..86: note = Synthetic Polynucleotide
  source 1..86: mol_type = other DNA
  modified_base 9: mod_base = OTHER; note = Uracil
  modified_base 14: mod_base = OTHER; note = Uracil
  modified_base 23..25: mod_base = OTHER; note = Uracil
  modified_base 28: mod_base = OTHER; note = Uracil
  modified_base 31: mod_base = OTHER; note = Uracil
  modified_base 34: mod_base = OTHER; note = Uracil
  modified_base 38: mod_base = OTHER; note = Uracil
  modified_base 43: mod_base = OTHER; note = Uracil
  modified_base 48..49: mod_base = OTHER; note = Uracil
  modified_base 54..55: mod_base = OTHER; note = Uracil
  modified_base 61: mod_base = OTHER; note = Uracil
  modified_base 70: mod_base = OTHER; note = Uracil
  modified_base 74: mod_base = OTHER; note = Uracil
  modified_base 80: mod_base = OTHER; note = Uracil
ggaggagctacgatgcggccgatttcgtcatcctccataccatcgccttaccattccgcgtcagacgactcgctgaggatccgaca

SEQ ID NO: 15 - DNA, 86 bp, synthetic construct
  misc_feature 1..86: note = Synthetic Polynucleotide
  source 1..86: mol_type = other DNA
  modified_base 9: mod_base = OTHER; note = Uracil
  modified_base 14: mod_base = OTHER; note = Uracil
  modified_base 23..25: mod_base = OTHER; note = Uracil
  modified_base 28: mod_base = OTHER; note = Uracil
  modified_base 31: mod_base = OTHER; note = Uracil
  modified_base 38: mod_base = OTHER; note = Uracil
  modified_base 43: mod_base = OTHER; note = Uracil
  modified_base 43: mod_base = OTHER; note = Uracil
  modified_base 48..49: mod_base = OTHER; note = Uracil
  modified_base 54..55: mod_base = OTHER; note = Uracil
  modified_base 61: mod_base = OTHER; note = Uracil
  modified_base 70: mod_base = OTHER; note = Uracil
  modified_base 74: mod_base = OTHER; note = Uracil
  modified_base 80: mod_base = OTHER; note = Uracil
ggaggagctacgatgcggccgatttcgtcatcccccataccatcgccttaccgttccgcgtcagacgactcgctgaggatccgaca

SEQ ID NO: 16 - DNA, 86 bp, synthetic construct
  misc_feature 1..86: note = Synthetic Polynucleotide
  source 1..86: mol_type = other DNA
  modified_base 9: mod_base = OTHER; note = Uracil
  modified_base 14: mod_base = OTHER; note = Uracil
  modified_base 23: mod_base = OTHER; note = Uracil
  modified_base 25: mod_base = OTHER; note = Uracil
  modified_base 28: mod_base = OTHER; note = Uracil
  modified_base 31: mod_base = OTHER; note = Uracil
  modified_base 34: mod_base = OTHER; note = Uracil
  modified_base 38: mod_base = OTHER; note = Uracil
  modified_base 43: mod_base = OTHER; note = Uracil
  modified_base 48..49: mod_base = OTHER; note = Uracil
  modified_base 54..55: mod_base = OTHER; note = Uracil
  modified_base 61: mod_base = OTHER; note = Uracil
  modified_base 70: mod_base = OTHER; note = Uracil
  modified_base 74: mod_base = OTHER; note = Uracil
  modified_base 80: mod_base = OTHER; note = Uracil
ggaggagctacgatgcggccgatatcgtcatcctccataccatcgccttaccgttccgcgtcagacgactcgctgaggatccgaca

SEQ ID NO: 17 - DNA, 85 bp, synthetic construct
  misc_feature 1..85: note = Synthetic Polynucleotide
  source 1..85: mol_type = other DNA
  modified_base 9: mod_base = OTHER; note = Uracil
  modified_base 14: mod_base = OTHER; note = Uracil
  modified_base 23..25: mod_base = OTHER; note = Uracil
  modified_base 28: mod_base = OTHER; note = Uracil
  modified_base 31: mod_base = OTHER; note = Uracil
  modified_base 34: mod_base = OTHER; note = Uracil
  modified_base 38: mod_base = OTHER; note = Uracil
  modified_base 43: mod_base = OTHER; note = Uracil
  modified_base 48: mod_base = OTHER; note = Uracil
  modified_base 53..54: mod_base = OTHER; note = Uracil
  modified_base 60: mod_base = OTHER; note = Uracil
  modified_base 69: mod_base = OTHER; note = Uracil
  modified_base 73: mod_base = OTHER; note = Uracil
  modified_base 79: mod_base = OTHER; note = Uracil
ggaggagctacgatgcggccgatttcgtcatcctccataccatcgcctaccgttccgcgtcagacgactcgctgaggatccgaca

SEQ ID NO: 18 - DNA, 87 bp, synthetic construct
  misc_feature 1..87: note = Synthetic Polynucleotide
  source 1..87: mol_type = other DNA
  modified_base 18: mod_base = OTHER; note = Uracil
  modified_base 14: mod_base = OTHER; note = Uracil
  modified_base 19: mod_base = OTHER; note = Uracil
  modified_base 21: mod_base = OTHER; note = Uracil
  modified_base 26: mod_base = OTHER; note = Uracil
  modified_base 29..30: mod_base = OTHER; note = Uracil
  modified_base 34..36: mod_base = OTHER; note = Uracil
  modified_base 38: mod_base = OTHER; note = Uracil
  modified_base 40..41: mod_base = OTHER; note = Uracil
  modified_base 43: mod_base = OTHER; note = Uracil
  modified_base 54: mod_base = OTHER; note = Uracil
  modified_base 56: mod_base = OTHER; note = Uracil
  modified_base 71: mod_base = OTHER; note = Uracil
  modified_base 75: mod_base = OTHER; note = Uracil
  modified_base 81: mod_base = OTHER; note = Uracil
ggaggagctacgatgcggtgtacactgattgcctttgtgttatgagcgacagatctgccagacagacgactcgctgaggatccgaca

SEQ ID NO: 19 - DNA, 86 bp, synthetic construct
  misc_feature 1..86: note = Synthetic Polynucleotide
  source 1..86: mol_type = other DNA
  modified_base 9: mod_base = OTHER; note = Uracil
  modified_base 14: mod_base = OTHER; note = Uracil
  modified_base 22..23: mod_base = OTHER; note = Uracil
  modified_base 25..28: mod_base = OTHER; note = Uracil
  modified_base 31: mod_base = OTHER; note = Uracil
  modified_base 33: mod_base = OTHER; note = Uracil
  modified_base 35: mod_base = OTHER; note = Uracil
  modified_base 43..44: mod_base = OTHER; note = Uracil
  modified_base 50..52: mod_base = OTHER; note = Uracil
  modified_base 54: mod_base = OTHER; note = Uracil
  modified_base 58: mod_base = OTHER; note = Uracil
  modified_base 61: mod_base = OTHER; note = Uracil
  modified_base 70: mod_base = OTHER; note = Uracil
  modified_base 74: mod_base = OTHER; note = Uracil
  modified_base 80: mod_base = OTHER; note = Uracil
ggaggagctacgatgcggaccttgttttcctctgtaccccacttccccatttctccctgctcagacgactcgctgaggatccgaca

SEQ ID NO: 20 - DNA, 86 bp, synthetic construct
  misc_feature 1..86: note = Synthetic Polynucleotide
  source 1..86: mol_type = other DNA
  modified_base 9: mod_base = OTHER; note = Uracil
  modified_base 14: mod_base = OTHER; note = Uracil
  modified_base 23: mod_base = OTHER; note = Uracil
  modified_base 25: mod_base = OTHER; note = Uracil
  modified_base 28: mod_base = OTHER; note = Uracil
  modified_base 31: mod_base = OTHER; note = Uracil
  modified_base 34: mod_base = OTHER; note = Uracil
  modified_base 38: mod_base = OTHER; note = Uracil
  modified_base 43: mod_base = OTHER; note = Uracil
  modified_base 48..49: mod_base = OTHER; note = Uracil
  modified_base 54..55: mod_base = OTHER; note = Uracil
  modified_base 61: mod_base = OTHER; note = Uracil
  modified_base 70: mod_base = OTHER; note = Uracil
  modified_base 74: mod_base = OTHER; note = Uracil
  modified_base 80: mod_base = OTHER; note = Uracil
ggaggagctacgatgcggccgatctcgtcatcctccataccatcgccttaccgttccgcgtcagacgactcgctgaggatccgaca

SEQ ID NO: 21 - DNA, 86 bp, synthetic construct
  misc_feature 1..86: note = Synthetic Polynucleotide
  source 1..86: mol_type = other DNA
  modified_base 9: mod_base = OTHER; note = Uracil
  modified_base 14: mod_base = OTHER; note = Uracil
  modified_base 23..25: mod_base = OTHER; note = Uracil
  modified_base 28: mod_base = OTHER; note = Uracil
  modified_base 31: mod_base = OTHER; note = Uracil
  modified_base 34: mod_base = OTHER; note = Uracil
  modified_base 38: mod_base = OTHER; note = Uracil
  modified_base 43: mod_base = OTHER; note = Uracil
  modified_base 48..49: mod_base = OTHER; note = Uracil
  modified_base 54: mod_base = OTHER; note = Uracil
  modified_base 61: mod_base = OTHER; note = Uracil
  modified_base 70: mod_base = OTHER; note = Uracil
  modified_base 74: mod_base = OTHER; note = Uracil
  modified_base 80: mod_base = OTHER; note = Uracil
ggaggagctacgatgcggccgatttcgtcatcctccataccatcgccttaccgtcccgcgtcagacgactcgctgaggatccgaca

SEQ ID NO: 22 - DNA, 86 bp, synthetic construct
  misc_feature 1..86: note = Synthetic Polynucleotide
  source 1..86: mol_type = other DNA
  modified_base 9: mod_base = OTHER; note = Uracil
  modified_base 14: mod_base = OTHER; note = Uracil
  modified_base 23..25: mod_base = OTHER; note = Uracil
  modified_base 28: mod_base = OTHER; note = Uracil
  modified_base 31: mod_base = OTHER; note = Uracil
  modified_base 34: mod_base = OTHER; note = Uracil
  modified_base 38: mod_base = OTHER; note = Uracil
  modified_base 43: mod_base = OTHER; note = Uracil
  modified_base 48..49: mod_base = OTHER; note = Uracil
  modified_base 54..55: mod_base = OTHER; note = Uracil
  modified_base 61: mod_base = OTHER; note = Uracil
  modified_base 70: mod_base = OTHER; note = Uracil
  modified_base 74: mod_base = OTHER; note = Uracil
  modified_base 80: mod_base = OTHER; note = Uracil
ggaggagctacgatgcggccgatttcgtcatcctccataccgtcgccttaccgttccgcgtcagacgactcgctgaggatccgaca

SEQ ID NO: 23 - DNA, 86 bp, synthetic construct
  misc_feature 1..86: note = Synthetic Polynucleotide
  source 1..86: mol_type = other DNA
  modified_base 9: mod_base = OTHER; note = Uracil
  modified_base 14: mod_base = OTHER; note = Uracil
  modified_base 23..25: mod_base = OTHER; note = Uracil
  modified_base 28: mod_base = OTHER; note = Uracil
  modified_base 31: mod_base = OTHER; note = Uracil
  modified_base 34: mod_base = OTHER; note = Uracil
  modified_base 38: mod_base = OTHER; note = Uracil
  modified_base 43: mod_base = OTHER; note = Uracil
  modified_base 48..49: mod_base = OTHER; note = Uracil
  modified_base 54..55: mod_base = OTHER; note = Uracil
  modified_base 61: mod_base = OTHER; note = Uracil
  modified_base 70: mod_base = OTHER; note = Uracil
  modified_base 74: mod_base = OTHER; note = Uracil
  modified_base 80: mod_base = OTHER; note = Uracil
ggaggagctacgatgcggccgatttcgtcgtcctccataccatcgccttaccgttccgcgtcagacgactcgctgaggatccgaca

SEQ ID NO: 24 - DNA, 87 bp, synthetic construct
  misc_feature 1..87: note = Synthetic Polynucleotide
  source 1..87: mol_type = other DNA
  modified_base 9: mod_base = OTHER; note = Uracil
  modified_base 14: mod_base = OTHER; note = Uracil
  modified_base 30..31: mod_base = OTHER; note = Uracil
  modified_base 34: mod_base = OTHER; note = Uracil
  modified_base 40..41: mod_base = OTHER; note = Uracil
  modified_base 44: mod_base = OTHER; note = Uracil
  modified_base 48: mod_base = OTHER; note = Uracil
  modified_base 55: mod_base = OTHER; note = Uracil
  modified_base 58: mod_base = OTHER; note = Uracil
  modified_base 71: mod_base = OTHER; note = Uracil
  modified_base 75: mod_base = OTHER; note = Uracil
  modified_base 81: mod_base = OTHER; note = Uracil
ggaggagctacgatgcggggaagcaacacttagtcgcgattgatacgtgcgcagtcatcagacagacgactcgctgaggatccgaca

SEQ ID NO: 25 - DNA, 86 bp, synthetic construct
  misc_feature 1..86: note = Synthetic Polynucleotide
  source 1..86: mol_type = other DNA
  modified_base 9: mod_base = OTHER; note = Uracil
  modified_base 14: mod_base = OTHER; note = Uracil
  modified_base 23..25: mod_base = OTHER; note = Uracil
  modified_base 31: mod_base = OTHER; note = Uracil
  modified_base 34: mod_base = OTHER; note = Uracil
  modified_base 38: mod_base = OTHER; note = Uracil
  modified_base 43: mod_base = OTHER; note = Uracil
  modified_base 48..49: mod_base = OTHER; note = Uracil
  modified_base 54..55: mod_base = OTHER; note = Uracil
  modified_base 61: mod_base = OTHER; note = Uracil
  modified_base 70: mod_base = OTHER; note = Uracil
  modified_base 74: mod_base = OTHER; note = Uracil
  modified_base 80: mod_base = OTHER; note = Uracil
ggaggagctacgatgcggccgatttcgccatcctccataccatcgccttaccgttccgcgtcagacgactcgctgaggatccgaca

SEQ ID NO: 26 - DNA, 85 bp, synthetic construct
  misc_feature 1..85: note = Synthetic Polynucleotide
  source 1..85: mol_type = other DNA
  modified_base 9: mod_base = OTHER; note = Uracil
  modified_base 14: mod_base = OTHER; note = Uracil
  modified_base 23..25: mod_base = OTHER; note = Uracil
  modified_base 28: mod_base = OTHER; note = Uracil
  modified_base 31: mod_base = OTHER; note = Uracil
  modified_base 34: mod_base = OTHER; note = Uracil
  modified_base 38: mod_base = OTHER; note = Uracil
  modified_base 43: mod_base = OTHER; note = Uracil
  modified_base 48..49: mod_base = OTHER; note = Uracil
  modified_base 53..54: mod_base = OTHER; note = Uracil
  modified_base 60: mod_base = OTHER; note = Uracil
  modified_base 69: mod_base = OTHER; note = Uracil
  modified_base 73: mod_base = OTHER; note = Uracil
  modified_base 79: mod_base = OTHER; note = Uracil
ggaggagctacgatgcggccgatttcgtcatcctccataccatcgccttccgttccgcgtcagacgactcgctgaggatccgaca

SEQ ID NO: 27 - DNA, 86 bp, synthetic construct
  misc_feature 1..86: note = Synthetic Polynucleotide
  source 1..86: mol_type = other DNA
  modified_base 9: mod_base = OTHER; note = Uracil
  modified_base 14: mod_base = OTHER; note = Uracil
  modified_base 23..25: mod_base = OTHER; note = Uracil
  modified_base 28: mod_base = OTHER; note = Uracil
  modified_base 34: mod_base = OTHER; note = Uracil
  modified_base 31: mod_base = OTHER; note = Uracil
  modified_base 38: mod_base = OTHER; note = Uracil
  modified_base 40: mod_base = OTHER; note = Uracil
  modified_base 43: mod_base = OTHER; note = Uracil
  modified_base 48..49: mod_base = OTHER; note = Uracil
  modified_base 54..55: mod_base = OTHER; note = Uracil
  modified_base 61: mod_base = OTHER; note = Uracil
  modified_base 70: mod_base = OTHER; note = Uracil
  modified_base 74: mod_base = OTHER; note = Uracil
  modified_base 80: mod_base = OTHER; note = Uracil
ggaggagctacgatgcggccgatttcgtcatcctccatatcatcgccttaccgttccgcgtcagacgactcgctgaggatccgaca

SEQ ID NO: 28 - DNA, 86 bp, synthetic construct
  misc_feature 1..86: note = Synthetic Polynucleotide
  source 1..86: mol_type = other DNA
  modified_base 9: mod_base = OTHER; note = Uracil
  modified_base 14: mod_base = OTHER; note = Uracil
  modified_base 23..25: mod_base = OTHER; note = Uracil
  modified_base 28: mod_base = OTHER; note = Uracil
  modified_base 34: mod_base = OTHER; note = Uracil
  modified_base 38: mod_base = OTHER; note = Uracil
  modified_base 43: mod_base = OTHER; note = Uracil
  modified_base 48..49: mod_base = OTHER; note = Uracil
  modified_base 54..55: mod_base = OTHER; note = Uracil
  modified_base 61: mod_base = OTHER; note = Uracil
  modified_base 70: mod_base = OTHER; note = Uracil
  modified_base 74: mod_base = OTHER; note = Uracil
  modified_base 80: mod_base = OTHER; note = Uracil
ggaggagctacgatgcggccgatttcgtcaccctccataccatcgccttaccgttccgcgtcagacgactcgctgaggatccgaca

SEQ ID NO: 29 - DNA, 86 bp, synthetic construct
  misc_feature 1..86: note = Synthetic Polynucleotide
  source 1..86: mol_type = other DNA
  modified_base 9: mod_base = OTHER; note = Uracil
  modified_base 14: mod_base = OTHER; note = Uracil
  modified_base 24..25: mod_base = OTHER; note = Uracil
  modified_base 28: mod_base = OTHER; note = Uracil
  modified_base 31: mod_base = OTHER; note = Uracil
  modified_base 34: mod_base = OTHER; note = Uracil
  modified_base 38: mod_base = OTHER; note = Uracil
  modified_base 43: mod_base = OTHER; note = Uracil
  modified_base 48..49: mod_base = OTHER; note = Uracil
  modified_base 54..55: mod_base = OTHER; note = Uracil
  modified_base 61: mod_base = OTHER; note = Uracil
  modified_base 70: mod_base = OTHER; note = Uracil
  modified_base 74: mod_base = OTHER; note = Uracil
  modified_base 80: mod_base = OTHER; note = Uracil
ggaggagctacgatgcggccgacttcgtcatcctccataccatcgccttaccgttccgcgtcagacgactcgctgaggatccgaca

SEQ ID NO: 30 - DNA, 85 bp, synthetic construct
  misc_feature 1..85: note = Synthetic Polynucleotide
  source 1..85: mol_type = other DNA
  modified_base 9: mod_base = OTHER; note = Uracil
  modified_base 14: mod_base = OTHER; note = Uracil
  modified_base 23..25: mod_base = OTHER; note = Uracil
  modified_base 28: mod_base = OTHER; note = Uracil
  modified_base 31: mod_base = OTHER; note = Uracil
  modified_base 34: mod_base = OTHER; note = Uracil
  modified_base 38: mod_base = OTHER; note = Uracil
  modified_base 43: mod_base = OTHER; note = Uracil
  modified_base 48..49: mod_base = OTHER; note = Uracil
  modified_base 53..54: mod_base = OTHER; note = Uracil
  modified_base 60: mod_base = OTHER; note = Uracil
  modified_base 69: mod_base = OTHER; note = Uracil
  modified_base 73: mod_base = OTHER; note = Uracil
  modified_base 79: mod_base = OTHER; note = Uracil
ggaggagctacgatgcggccgatttcgtcatcctccataccatcgccttaccttccgcgtcagacgactcgctgaggatccgaca

SEQ ID NO: 31 - DNA, 87 bp, synthetic construct
  misc_feature 1..87: note = Synthetic Polynucleotide
  source 1..87: mol_type = other DNA
  modified_base 9: mod_base = OTHER; note = Uracil
  modified_base 14: mod_base = OTHER; note = Uracil
  modified_base 23..25: mod_base = OTHER; note = Uracil
  modified_base 28: mod_base = OTHER; note = Uracil
  modified_base 31: mod_base = OTHER; note = Uracil
  modified_base 34: mod_base = OTHER; note = Uracil
  modified_base 38: mod_base = OTHER; note = Uracil
  modified_base 43: mod_base = OTHER; note = Uracil
  modified_base 54..55: mod_base = OTHER; note = Uracil
  modified_base 48..49: mod_base = OTHER; note = Uracil
  modified_base 62: mod_base = OTHER; note = Uracil
  modified_base 71: mod_base = OTHER; note = Uracil
  modified_base 75: mod_base = OTHER; note = Uracil
  modified_base 81: mod_base = OTHER; note = Uracil
ggaggagctacgatgcggccgatttcgtcatcctccataccatcgccttaccgttccgcagtcagacgactcgctgaggatccgaca

SEQ ID NO: 32 - DNA, 86 bp, synthetic construct
  misc_feature 1..86: note = Synthetic Polynucleotide
  source 1..86: mol_type = other DNA
  modified_base 9: mod_base = OTHER; note = Uracil
  modified_base 14: mod_base = OTHER; note = Uracil
  modified_base 23..25: mod_base = OTHER; note = Uracil
  modified_base 28: mod_base = OTHER; note = Uracil
  modified_base 31: mod_base = OTHER; note = Uracil
  modified_base 34: mod_base = OTHER; note = Uracil
  modified_base 37..38: mod_base = OTHER; note = Uracil
  modified_base 48..49: mod_base = OTHER; note = Uracil
  modified_base 43: mod_base = OTHER; note = Uracil
  modified_base 54..55: mod_base = OTHER; note = Uracil
  modified_base 61: mod_base = OTHER; note = Uracil
  modified_base 70: mod_base = OTHER; note = Uracil
  modified_base 74: mod_base = OTHER; note = Uracil
  modified_base 80: mod_base = OTHER; note = Uracil
ggaggagctacgatgcggccgatttcgtcatcctccttaccatcgccttaccgttccgcgtcagacgactcgctgaggatccgaca

SEQ ID NO: 33 - DNA, 86 bp, synthetic construct
  misc_feature 1..86: note = Synthetic Polynucleotide
  source 1..86: mol_type = other DNA
  modified_base 9: mod_base = OTHER; note = Uracil
  modified_base 14: mod_base = OTHER; note = Uracil
  modified_base 23..25: mod_base = OTHER; note = Uracil
  modified_base 28: mod_base = OTHER; note = Uracil
  modified_base 31: mod_base = OTHER; note = Uracil
  modified_base 34..35: mod_base = OTHER; note = Uracil
  modified_base 38: mod_base = OTHER; note = Uracil
  modified_base 43: mod_base = OTHER; note = Uracil
  modified_base 48..49: mod_base = OTHER; note = Uracil
  modified_base 54..55: mod_base = OTHER; note = Uracil
  modified_base 61: mod_base = OTHER; note = Uracil
  modified_base 70: mod_base = OTHER; note = Uracil
  modified_base 74: mod_base = OTHER; note = Uracil
  modified_base 80: mod_base = OTHER; note = Uracil
ggaggagctacgatgcggccgatttcgtcatccttcataccatcgccttaccgttccgcgtcagacgactcgctgaggatccgaca

SEQ ID NO: 34 - DNA, 86 bp, synthetic construct
  misc_feature 1..86: note = Synthetic Polynucleotide
  source 1..86: mol_type = other DNA
  modified_base 9: mod_base = OTHER; note = Uracil
  modified_base 14: mod_base = OTHER; note = Uracil
  modified_base 23..25: mod_base = OTHER; note = Uracil
  modified_base 28: mod_base = OTHER; note = Uracil
  modified_base 31: mod_base = OTHER; note = Uracil
  modified_base 34: mod_base = OTHER; note = Uracil
  modified_base 38: mod_base = OTHER; note = Uracil
  modified_base 41: mod_base = OTHER; note = Uracil
  modified_base 43: mod_base = OTHER; note = Uracil
  modified_base 48..49: mod_base = OTHER; note = Uracil
  modified_base 54..55: mod_base = OTHER; note = Uracil
  modified_base 61: mod_base = OTHER; note = Uracil
  modified_base 70: mod_base = OTHER; note = Uracil
  modified_base 74: mod_base = OTHER; note = Uracil
  modified_base 80: mod_base = OTHER; note = Uracil
ggaggagctacgatgcggccgatttcgtcatcctccatactatcgccttaccgttccgcgtcagacgactcgctgaggatccgaca

SEQ ID NO: 35 - DNA, 86 bp, synthetic construct
  misc_feature 1..86: note = Synthetic Polynucleotide
  source 1..86: mol_type = other DNA
  modified_base 9: mod_base = OTHER; note = Uracil
  modified_base 14: mod_base = OTHER; note = Uracil
  modified_base 23..25: mod_base = OTHER; note = Uracil
  modified_base 28: mod_base = OTHER; note = Uracil
  modified_base 31: mod_base = OTHER; note = Uracil
  modified_base 34: mod_base = OTHER; note = Uracil
  modified_base 38: mod_base = OTHER; note = Uracil
  modified_base 43: mod_base = OTHER; note = Uracil
  modified_base 48..49: mod_base = OTHER; note = Uracil
  modified_base 54..55: mod_base = OTHER; note = Uracil
  modified_base 61: mod_base = OTHER; note = Uracil
  modified_base 70: mod_base = OTHER; note = Uracil
  modified_base 74: mod_base = OTHER; note = Uracil
  modified_base 80: mod_base = OTHER; note = Uracil
ggaggagctacgatgcggccgatttcatcatcctccataccatcgccttaccgttccgcgtcagacgactcgctgaggatccgaca

SEQ ID NO: 36 - DNA, 86 bp, synthetic construct
  misc_feature 1..86: note = Synthetic Polynucleotide
  source 1..86: mol_type = other DNA
  modified_base 9: mod_base = OTHER; note = Uracil
  modified_base 14: mod_base = OTHER; note = Uracil
  modified_base 23..25: mod_base = OTHER; note = Uracil
  modified_base 28: mod_base = OTHER; note = Uracil
  modified_base 31: mod_base = OTHER; note = Uracil
  modified_base 34: mod_base = OTHER; note = Uracil
  modified_base 38: mod_base = OTHER; note = Uracil
  modified_base 43: mod_base = OTHER; note = Uracil
  modified_base 48..49: mod_base = OTHER; note = Uracil
  modified_base 53..55: mod_base = OTHER; note = Uracil
  modified_base 61: mod_base = OTHER; note = Uracil
  modified_base 70: mod_base = OTHER; note = Uracil
  modified_base 74: mod_base = OTHER; note = Uracil
  modified_base 80: mod_base = OTHER; note = Uracil
ggaggagctacgatgcggccgatttcgtcatcctccataccatcgccttacctttccgcgtcagacgactcgctgaggatccgaca

SEQ ID NO: 37 - DNA, 86 bp, synthetic construct
  misc_feature 1..86: note = Synthetic Polynucleotide
  source 1..86: mol_type = other DNA
  modified_base 9: mod_base = OTHER; note = Uracil
  modified_base 14: mod_base = OTHER; note = Uracil
  modified_base 23..25: mod_base = OTHER; note = Uracil
  modified_base 28: mod_base = OTHER; note = Uracil
  modified_base 31: mod_base = OTHER; note = Uracil
  modified_base 34: mod_base = OTHER; note = Uracil
  modified_base 38: mod_base = OTHER; note = Uracil
  modified_base 36: mod_base = OTHER; note = Uracil
  modified_base 43: mod_base = OTHER; note = Uracil
  modified_base 48..49: mod_base = OTHER; note = Uracil
  modified_base 54..55: mod_base = OTHER; note = Uracil
  modified_base 61: mod_base = OTHER; note = Uracil
  modified_base 70: mod_base = OTHER; note = Uracil
  modified_base 74: mod_base = OTHER; note = Uracil
  modified_base 80: mod_base = OTHER; note = Uracil
ggaggagctacgatgcggccgatttcgtcatcctctataccatcgccttaccgttccgcgtcagacgactcgctgaggatccgaca

SEQ ID NO: 38 - DNA, 86 bp, synthetic construct
  misc_feature 1..86: note = Synthetic Polynucleotide
  source 1..86: mol_type = other DNA
  modified_base 9: mod_base = OTHER; note = Uracil
  modified_base 14: mod_base = OTHER; note = Uracil
  modified_base 23..25: mod_base = OTHER; note = Uracil
  modified_base 28: mod_base = OTHER; note = Uracil
  modified_base 31: mod_base = OTHER; note = Uracil
  modified_base 34: mod_base = OTHER; note = Uracil
  modified_base 43: mod_base = OTHER; note = Uracil
  modified_base 48..49: mod_base = OTHER; note = Uracil
  modified_base 54..55: mod_base = OTHER; note = Uracil
  modified_base 61: mod_base = OTHER; note = Uracil
  modified_base 70: mod_base = OTHER; note = Uracil
  modified_base 74: mod_base = OTHER; note = Uracil
  modified_base 80: mod_base = OTHER; note = Uracil
ggaggagctacgatgcggccgatttcgtcatcctccaaaccatcgccttaccgttccgcgtcagacgactcgctgaggatccgaca

SEQ ID NO: 39 - DNA, 86 bp, synthetic construct
  misc_feature 1..86: note = Synthetic Polynucleotide
  source 1..86: mol_type = other DNA
  modified_base 9: mod_base = OTHER; note = Uracil
  modified_base 14: mod_base = OTHER; note = Uracil
  modified_base 23..25: mod_base = OTHER; note = Uracil
  modified_base 28: mod_base = OTHER; note = Uracil
  modified_base 31: mod_base = OTHER; note = Uracil
  modified_base 34: mod_base = OTHER; note = Uracil
  modified_base 38: mod_base = OTHER; note = Uracil
  modified_base 43: mod_base = OTHER; note = Uracil
  modified_base 48..49: mod_base = OTHER; note = Uracil
  modified_base 51: mod_base = OTHER; note = Uracil
  modified_base 54..55: mod_base = OTHER; note = Uracil
  modified_base 61: mod_base = OTHER; note = Uracil
  modified_base 70: mod_base = OTHER; note = Uracil
  modified_base 74: mod_base = OTHER; note = Uracil
  modified_base 80: mod_base = OTHER; note = Uracil
ggaggagctacgatgcggccgatttcgtcatcctccataccatcgccttatcgttccgcgtcagacgactcgctgaggatccgaca

SEQ ID NO: 40 - DNA, 86 bp, synthetic construct
  misc_feature 1..86: note = Synthetic Polynucleotide
  source 1..86: mol_type = other DNA
  modified_base 9: mod_base = OTHER; note = Uracil
  modified_base 14: mod_base = OTHER; note = Uracil
  modified_base 23..24: mod_base = OTHER; note = Uracil
  modified_base 28: mod_base = OTHER; note = Uracil
  modified_base 31: mod_base = OTHER; note = Uracil
  modified_base 34: mod_base = OTHER; note = Uracil
  modified_base 38: mod_base = OTHER; note = Uracil
  modified_base 43: mod_base = OTHER; note = Uracil
  modified_base 48..49: mod_base = OTHER; note = Uracil
  modified_base 54..55: mod_base = OTHER; note = Uracil
  modified_base 61: mod_base = OTHER; note = Uracil
  modified_base 70: mod_base = OTHER; note = Uracil
  modified_base 74: mod_base = OTHER; note = Uracil
  modified_base 80: mod_base = OTHER; note = Uracil
ggaggagctacgatgcggccgattccgtcatcctccataccatcgccttaccgttccgcgtcagacgactcgctgaggatccgaca

SEQ ID NO: 41 - DNA, 86 bp, synthetic construct
  misc_feature 1..86: note = Synthetic Polynucleotide
  source 1..86: mol_type = other DNA
  modified_base 9: mod_base = OTHER; note = Uracil
  modified_base 14: mod_base = OTHER; note = Uracil
  modified_base 20: mod_base = OTHER; note = Uracil
  modified_base 23..25: mod_base = OTHER; note = Uracil
  modified_base 28: mod_base = OTHER; note = Uracil
  modified_base 31: mod_base = OTHER; note = Uracil
  modified_base 38: mod_base = OTHER; note = Uracil
  modified_base 34: mod_base = OTHER; note = Uracil
  modified_base 43: mod_base = OTHER; note = Uracil
  modified_base 48..49: mod_base = OTHER; note = Uracil
  modified_base 54..55: mod_base = OTHER; note = Uracil
  modified_base 61: mod_base = OTHER; note = Uracil
  modified_base 70: mod_base = OTHER; note = Uracil
  modified_base 74: mod_base = OTHER; note = Uracil
  modified_base 80: mod_base = OTHER; note = Uracil
ggaggagctacgatgcggctgatttcgtcatcctccataccatcgccttaccgttccgcgtcagacgactcgctgaggatccgaca

SEQ ID NO: 42 - DNA, 87 bp, synthetic construct
  misc_feature 1..87: note = Synthetic Polynucleotide
  source 1..87: mol_type = other DNA
  modified_base 9: mod_base = OTHER; note = Uracil
  modified_base 14: mod_base = OTHER; note = Uracil
  modified_base 23..26: mod_base = OTHER; note = Uracil
  modified_base 29: mod_base = OTHER; note = Uracil
  modified_base 32: mod_base = OTHER; note = Uracil
  modified_base 35: mod_base = OTHER; note = Uracil
  modified_base 39: mod_base = OTHER; note = Uracil
  modified_base 44: mod_base = OTHER; note = Uracil
  modified_base 49..50: mod_base = OTHER; note = Uracil
  modified_base 55..56: mod_base = OTHER; note = Uracil
  modified_base 62: mod_base = OTHER; note = Uracil
  modified_base 71: mod_base = OTHER; note = Uracil
  modified_base 75: mod_base = OTHER; note = Uracil
  modified_base 75: mod_base = OTHER; note = Uracil
  modified_base 81: mod_base = OTHER; note = Uracil
ggaggagctacgatgcggccgattttcgtcatcctccataccatcgccttaccgttccgcgtcagacgactcgctgaggatccgaca

SEQ ID NO: 43 - DNA, 86 bp, synthetic construct
  misc_feature 1..86: note = Synthetic Polynucleotide
  source 1..86: mol_type = other DNA
  modified_base 9: mod_base = OTHER; note = Uracil
  modified_base 14: mod_base = OTHER; note = Uracil
  modified_base 23..25: mod_base = OTHER; note = Uracil
  modified_base 28: mod_base = OTHER; note = Uracil
  modified_base 31: mod_base = OTHER; note = Uracil
  modified_base 34: mod_base = OTHER; note = Uracil
  modified_base 38: mod_base = OTHER; note = Uracil
  modified_base 43: mod_base = OTHER; note = Uracil
  modified_base 48..49: mod_base = OTHER; note = Uracil
  modified_base 54..55: mod_base = OTHER; note = Uracil
  modified_base 61: mod_base = OTHER; note = Uracil
  modified_base 70: mod_base = OTHER; note = Uracil
  modified_base 74: mod_base = OTHER; note = Uracil
  modified_base 80: mod_base = OTHER; note = Uracil
ggaggagctacgatgcggccgatttcgtcatcctcaataccatcgccttaccgttccgcgtcagacgactcgctgaggatccgaca

SEQ ID NO: 44 - DNA, 86 bp, synthetic construct
  misc_feature 1..86: note = Synthetic Polynucleotide
  source 1..86: mol_type = other DNA
  modified_base 9: mod_base = OTHER; note = Uracil
  modified_base 14: mod_base = OTHER; note = Uracil
  modified_base 23..25: mod_base = OTHER; note = Uracil
  modified_base 28: mod_base = OTHER; note = Uracil
  modified_base 31: mod_base = OTHER; note = Uracil
  modified_base 34: mod_base = OTHER; note = Uracil
  modified_base 38: mod_base = OTHER; note = Uracil
  modified_base 43: mod_base = OTHER; note = Uracil
  modified_base 54..55: mod_base = OTHER; note = Uracil
  modified_base 48..49: mod_base = OTHER; note = Uracil
  modified_base 61: mod_base = OTHER; note = Uracil
  modified_base 70: mod_base = OTHER; note = Uracil
  modified_base 74: mod_base = OTHER; note = Uracil
  modified_base 80: mod_base = OTHER; note = Uracil
ggaggagctacgatgcggccgatttcgtcatcctccataccatcgccttcccgttccgcgtcagacgactcgctgaggatccgaca

SEQ ID NO: 45 - DNA, 87 bp, synthetic construct
  misc_feature 1..87: note = Synthetic Polynucleotide
  source 1..87: mol_type = other DNA
  modified_base 9: mod_base = OTHER; note = Uracil
  modified_base 14: mod_base = OTHER; note = Uracil
  modified_base 20..21: mod_base = OTHER; note = Uracil
  modified_base 28..29: mod_base = OTHER; note = Uracil
  modified_base 42: mod_base = OTHER; note = Uracil
  modified_base 44: mod_base = OTHER; note = Uracil
  modified_base 47: mod_base = OTHER; note = Uracil
  modified_base 52: mod_base = OTHER; note = Uracil
  modified_base 54..55: mod_base = OTHER; note = Uracil
  modified_base 71: mod_base = OTHER; note = Uracil
  modified_base 75: mod_base = OTHER; note = Uracil
  modified_base 81: mod_base = OTHER; note = Uracil
ggaggagctacgatgcggattaccaacttgaacgccgagagtgtggtcacgtgttctgcagacagacgactcgctgaggatccgaca

SEQ ID NO: 46 - DNA, 86 bp, synthetic construct
  misc_feature 1..86: note = Synthetic Polynucleotide
  source 1..86: mol_type = other DNA
  modified_base 9: mod_base = OTHER; note = Uracil
  modified_base 14: mod_base = OTHER; note = Uracil
  modified_base 23..25: mod_base = OTHER; note = Uracil
  modified_base 28: mod_base = OTHER; note = Uracil
  modified_base 31: mod_base = OTHER; note = Uracil
  modified_base 34: mod_base = OTHER; note = Uracil
  modified_base 38: mod_base = OTHER; note = Uracil
  modified_base 43: mod_base = OTHER; note = Uracil
  modified_base 48..49: mod_base = OTHER; note = Uracil
  modified_base 54..56: mod_base = OTHER; note = Uracil
  modified_base 61: mod_base = OTHER; note = Uracil
  modified_base 70: mod_base = OTHER; note = Uracil
  modified_base 74: mod_base = OTHER; note = Uracil
  modified_base 80: mod_base = OTHER; note = Uracil
ggaggagctacgatgcggccgatttcgtcatcctccataccatcgccttaccgtttcgcgtcagacgactcgctgaggatccgaca

SEQ ID NO: 47 - DNA, 85 bp, synthetic construct
  misc_feature 1..85: note = Synthetic Polynucleotide
  source 1..85: mol_type = other DNA
  modified_base 9: mod_base = OTHER; note = Uracil
  modified_base 14: mod_base = OTHER; note = Uracil
  modified_base 23..25: mod_base = OTHER; note = Uracil
  modified_base 28: mod_base = OTHER; note = Uracil
  modified_base 30: mod_base = OTHER; note = Uracil
  modified_base 33: mod_base = OTHER; note = Uracil
  modified_base 37: mod_base = OTHER; note = Uracil
  modified_base 42: mod_base = OTHER; note = Uracil
  modified_base 47..48: mod_base = OTHER; note = Uracil
  modified_base 53..54: mod_base = OTHER; note = Uracil
  modified_base 60: mod_base = OTHER; note = Uracil
  modified_base 69: mod_base = OTHER; note = Uracil
  modified_base 73: mod_base = OTHER; note = Uracil
  modified_base 79: mod_base = OTHER; note = Uracil
ggaggagctacgatgcggccgatttcgtatcctccataccatcgccttaccgttccgcgtcagacgactcgctgaggatccgaca

SEQ ID NO: 48 - DNA, 87 bp, synthetic construct
  misc_feature 1..87: note = Synthetic Polynucleotide
  source 1..87: mol_type = other DNA
  modified_base 9: mod_base = OTHER; note = Uracil
  modified_base 14: mod_base = OTHER; note = Uracil
  modified_base 19..20: mod_base = OTHER; note = Uracil
  modified_base 19..20: mod_base = OTHER; note = Uracil
  modified_base 22: mod_base = OTHER; note = Uracil
  modified_base 26..28: mod_base = OTHER; note = Uracil
  modified_base 32: mod_base = OTHER; note = Uracil
  modified_base 35..36: mod_base = OTHER; note = Uracil
  modified_base 43..44: mod_base = OTHER; note = Uracil
  modified_base 49: mod_base = OTHER; note = Uracil
  modified_base 71: mod_base = OTHER; note = Uracil
  modified_base 75: mod_base = OTHER; note = Uracil
  modified_base 81: mod_base = OTHER; note = Uracil
ggaggagctacgatgcggttatgcgtttaagtcattgacgcgttacactggagggggccagacagacgactcgctgaggatccgaca

SEQ ID NO: 49 - DNA, 86 bp, synthetic construct
  misc_feature 1..86: note = Synthetic Polynucleotide
  source 1..86: mol_type = other DNA
  modified_base 9: mod_base = OTHER; note = Uracil
  modified_base 14: mod_base = OTHER; note = Uracil
  modified_base 23..25: mod_base = OTHER; note = Uracil
  modified_base 28: mod_base = OTHER; note = Uracil
  modified_base 31: mod_base = OTHER; note = Uracil
  modified_base 34: mod_base = OTHER; note = Uracil
  modified_base 38: mod_base = OTHER; note = Uracil
  modified_base 43: mod_base = OTHER; note = Uracil
  modified_base 48..49: mod_base = OTHER; note = Uracil
  modified_base 54..55: mod_base = OTHER; note = Uracil
  modified_base 61: mod_base = OTHER; note = Uracil
  modified_base 70: mod_base = OTHER; note = Uracil
  modified_base 74: mod_base = OTHER; note = Uracil
  modified_base 80: mod_base = OTHER; note = Uracil
ggaggagctacgatgcggccgatttcgtcatcctccataccatcgccttaccgttccgcatcagacgactcgctgaggatccgaca

SEQ ID NO: 50 - DNA, 86 bp, synthetic construct
  misc_feature 1..86: note = Synthetic Polynucleotide
  source 1..86: mol_type = other DNA
  modified_base 9: mod_base = OTHER; note = Uracil
  modified_base 14: mod_base = OTHER; note = Uracil
  modified_base 23..25: mod_base = OTHER; note = Uracil
  modified_base 28: mod_base = OTHER; note = Uracil
  modified_base 31: mod_base = OTHER; note = Uracil
  modified_base 34: mod_base = OTHER; note = Uracil
  modified_base 38: mod_base = OTHER; note = Uracil
  modified_base 43: mod_base = OTHER; note = Uracil
  modified_base 48..49: mod_base = OTHER; note = Uracil
  modified_base 54..55: mod_base = OTHER; note = Uracil
  modified_base 61: mod_base = OTHER; note = Uracil
  modified_base 70: mod_base = OTHER; note = Uracil
  modified_base 74: mod_base = OTHER; note = Uracil
  modified_base 80: mod_base = OTHER; note = Uracil
ggaggagctacgatgcggccgatttcgtcatcctccataacatcgccttaccgttccgcgtcagacgactcgctgaggatccgaca

SEQ ID NO: 51 - DNA, 85 bp, synthetic construct
  misc_feature 1..85: note = Synthetic Polynucleotide
  source 1..85: mol_type = other DNA
  modified_base 9: mod_base = OTHER; note = Uracil
  modified_base 14: mod_base = OTHER; note = Uracil
  modified_base 23..25: mod_base = OTHER; note = Uracil
  modified_base 28: mod_base = OTHER; note = Uracil
  modified_base 31: mod_base = OTHER; note = Uracil
  modified_base 34: mod_base = OTHER; note = Uracil
  modified_base 37: mod_base = OTHER; note = Uracil
  modified_base 42: mod_base = OTHER; note = Uracil
  modified_base 47..48: mod_base = OTHER; note = Uracil
  modified_base 53..54: mod_base = OTHER; note = Uracil
  modified_base 60: mod_base = OTHER; note = Uracil
  modified_base 69: mod_base = OTHER; note = Uracil
  modified_base 73: mod_base = OTHER; note = Uracil
  modified_base 79: mod_base = OTHER; note = Uracil
ggaggagctacgatgcggccgatttcgtcatcctcctaccatcgccttaccgttccgcgtcagacgactcgctgaggatccgaca

SEQ ID NO: 52 - DNA, 86 bp, synthetic construct
  misc_feature 1..86: note = Synthetic Polynucleotide
  source 1..86: mol_type = other DNA
  modified_base 9: mod_base = OTHER; note = Uracil
  modified_base 14: mod_base = OTHER; note = Uracil
  modified_base 23..25: mod_base = OTHER; note = Uracil
  modified_base 28..29: mod_base = OTHER; note = Uracil
  modified_base 31: mod_base = OTHER; note = Uracil
  modified_base 34: mod_base = OTHER; note = Uracil
  modified_base 38: mod_base = OTHER; note = Uracil
  modified_base 43: mod_base = OTHER; note = Uracil
  modified_base 48..49: mod_base = OTHER; note = Uracil
  modified_base 54..55: mod_base = OTHER; note = Uracil
  modified_base 61: mod_base = OTHER; note = Uracil
  modified_base 70: mod_base = OTHER; note = Uracil
  modified_base 74: mod_base = OTHER; note = Uracil
  modified_base 80: mod_base = OTHER; note = Uracil
ggaggagctacgatgcggccgatttcgttatcctccataccatcgccttaccgttccgcgtcagacgactcgctgaggatccgaca

SEQ ID NO: 53 - DNA, 86 bp, synthetic construct
  misc_feature 1..86: note = Synthetic Polynucleotide
  source 1..86: mol_type = other DNA
  modified_base 9: mod_base = OTHER; note = Uracil
  modified_base 14: mod_base = OTHER; note = Uracil
  modified_base 23..25: mod_base = OTHER; note = Uracil
  modified_base 28: mod_base = OTHER; note = Uracil
  modified_base 31: mod_base = OTHER; note = Uracil
  modified_base 34: mod_base = OTHER; note = Uracil
  modified_base 38: mod_base = OTHER; note = Uracil
  modified_base 43: mod_base = OTHER; note = Uracil
  modified_base 49: mod_base = OTHER; note = Uracil
  modified_base 54..55: mod_base = OTHER; note = Uracil
  modified_base 61: mod_base = OTHER; note = Uracil
  modified_base 70: mod_base = OTHER; note = Uracil
  modified_base 74: mod_base = OTHER; note = Uracil
  modified_base 80: mod_base = OTHER; note = Uracil
ggaggagctacgatgcggccgatttcgtcatcctccataccatcgccataccgttccgcgtcagacgactcgctgaggatccgaca

SEQ ID NO: 54 - DNA, 86 bp, synthetic construct
  misc_feature 1..86: note = Synthetic Polynucleotide
  source 1..86: mol_type = other DNA
  modified_base 9: mod_base = OTHER; note = Uracil
  modified_base 14: mod_base = OTHER; note = Uracil
  modified_base 23..25: mod_base = OTHER; note = Uracil
  modified_base 28: mod_base = OTHER; note = Uracil
  modified_base 31: mod_base = OTHER; note = Uracil
  modified_base 34: mod_base = OTHER; note = Uracil
  modified_base 38: mod_base = OTHER; note = Uracil
  modified_base 43: mod_base = OTHER; note = Uracil
  modified_base 48: mod_base = OTHER; note = Uracil
  modified_base 54..55: mod_base = OTHER; note = Uracil
  modified_base 61: mod_base = OTHER; note = Uracil
  modified_base 70: mod_base = OTHER; note = Uracil
  modified_base 74: mod_base = OTHER; note = Uracil
  modified_base 80: mod_base = OTHER; note = Uracil
ggaggagctacgatgcggccgatttcgtcatcctccataccatcgcctaaccgttccgcgtcagacgactcgctgaggatccgaca

SEQ ID NO: 55 - DNA, 86 bp, synthetic construct
  misc_feature 1..86: note = Synthetic Polynucleotide
  source 1..86: mol_type = other DNA
  modified_base 9: mod_base = OTHER; note = Uracil
  modified_base 14: mod_base = OTHER; note = Uracil
  modified_base 23..25: mod_base = OTHER; note = Uracil
  modified_base 28: mod_base = OTHER; note = Uracil
  modified_base 31: mod_base = OTHER; note = Uracil
  modified_base 34: mod_base = OTHER; note = Uracil
  modified_base 38: mod_base = OTHER; note = Uracil
  modified_base 43: mod_base = OTHER; note = Uracil
  modified_base 47..49: mod_base = OTHER; note = Uracil
  modified_base 54..55: mod_base = OTHER; note = Uracil
  modified_base 61: mod_base = OTHER; note = Uracil
  modified_base 70: mod_base = OTHER; note = Uracil
  modified_base 74: mod_base = OTHER; note = Uracil
  modified_base 80: mod_base = OTHER; note = Uracil
ggaggagctacgatgcggccgatttcgtcatcctccataccatcgctttaccgttccgcgtcagacgactcgctgaggatccgaca

SEQ ID NO: 56 - DNA, 86 bp, synthetic construct
  misc_feature 1..86: note = Synthetic Polynucleotide
  source 1..86: mol_type = other DNA
  modified_base 9: mod_base = OTHER; note = Uracil
  modified_base 14: mod_base = OTHER; note = Uracil
  modified_base 23..25: mod_base = OTHER; note = Uracil
  modified_base 28: mod_base = OTHER; note = Uracil
  modified_base 31: mod_base = OTHER; note = Uracil
  modified_base 34: mod_base = OTHER; note = Uracil
  modified_base 38: mod_base = OTHER; note = Uracil
  modified_base 43..44: mod_base = OTHER; note = Uracil
  modified_base 48..49: mod_base = OTHER; note = Uracil
  modified_base 54..55: mod_base = OTHER; note = Uracil
  modified_base 61: mod_base = OTHER; note = Uracil
  modified_base 70: mod_base = OTHER; note = Uracil
  modified_base 74: mod_base = OTHER; note = Uracil
  modified_base 80: mod_base = OTHER; note = Uracil
ggaggagctacgatgcggccgatttcgtcatcctccataccattgccttaccgttccgcgtcagacgactcgctgaggatccgaca

SEQ ID NO: 57 - DNA, 86 bp, synthetic construct
  misc_feature 1..86: note = Synthetic Polynucleotide
  source 1..86: mol_type = other DNA
  modified_base 9: mod_base = OTHER; note = Uracil
  modified_base 14: mod_base = OTHER; note = Uracil
  modified_base 23..25: mod_base = OTHER; note = Uracil
  modified_base 28: mod_base = OTHER; note = Uracil
  modified_base 31: mod_base = OTHER; note = Uracil
  modified_base 34: mod_base = OTHER; note = Uracil
  modified_base 38: mod_base = OTHER; note = Uracil
  modified_base 43: mod_base = OTHER; note = Uracil
  modified_base 48..49: mod_base = OTHER; note = Uracil
  modified_base 54..55: mod_base = OTHER; note = Uracil
  modified_base 61: mod_base = OTHER; note = Uracil
  modified_base 70: mod_base = OTHER; note = Uracil
  modified_base 74: mod_base = OTHER; note = Uracil
  modified_base 80: mod_base = OTHER; note = Uracil
ggaggagctacgatgcggccgatttcgtcatactccataccatcgccttaccgttccgcgtcagacgactcgctgaggatccgaca

SEQ ID NO: 58 - DNA, 86 bp, synthetic construct
  misc_feature 1..86: note = Synthetic Polynucleotide
  source 1..86: mol_type = other DNA
  modified_base 9: mod_base = OTHER; note = Uracil
  modified_base 14: mod_base = OTHER; note = Uracil
  modified_base 23..25: mod_base = OTHER; note = Uracil
  modified_base 28: mod_base = OTHER; note = Uracil
  modified_base 31: mod_base = OTHER; note = Uracil
  modified_base 34: mod_base = OTHER; note = Uracil
  modified_base 38: mod_base = OTHER; note = Uracil
  modified_base 43: mod_base = OTHER; note = Uracil
  modified_base 48..49: mod_base = OTHER; note = Uracil
  modified_base 54..55: mod_base = OTHER; note = Uracil
  modified_base 61: mod_base = OTHER; note = Uracil
  modified_base 70: mod_base = OTHER; note = Uracil
  modified_base 74: mod_base = OTHER; note = Uracil
  modified_base 80: mod_base = OTHER; note = Uracil
ggaggagctacgatgcggccgatttcgtcatcctccatagcatcgccttaccgttccgcgtcagacgactcgctgaggatccgaca

SEQ ID NO: 59 - DNA, 86 bp, synthetic construct
  misc_feature 1..86: note = Synthetic Polynucleotide
  source 1..86: mol_type = other DNA
  modified_base 9: mod_base = OTHER; note = Uracil
  modified_base 14: mod_base = OTHER; note = Uracil
  modified_base 23..25: mod_base = OTHER; note = Uracil
  modified_base 28: mod_base = OTHER; note = Uracil
  modified_base 31: mod_base = OTHER; note = Uracil
  modified_base 34: mod_base = OTHER; note = Uracil
  modified_base 38: mod_base = OTHER; note = Uracil
  modified_base 43: mod_base = OTHER; note = Uracil
  modified_base 48..49: mod_base = OTHER; note = Uracil
  modified_base 54..55: mod_base = OTHER; note = Uracil
  modified_base 61: mod_base = OTHER; note = Uracil
  modified_base 70: mod_base = OTHER; note = Uracil
  modified_base 74: mod_base = OTHER; note = Uracil
  modified_base 80: mod_base = OTHER; note = Uracil
ggaggagctacgatgcggccgatttcgtcatcctccataccatcgccttacccttccgcgtcagacgactcgctgaggatccgaca

SEQ ID NO: 60 - DNA, 86 bp, synthetic construct
  misc_feature 1..86: note = Synthetic Polynucleotide
  source 1..86: mol_type = other DNA
  modified_base 9: mod_base = OTHER; note = Uracil
  modified_base 14: mod_base = OTHER; note = Uracil
  modified_base 23..25: mod_base = OTHER; note = Uracil
  modified_base 28: mod_base = OTHER; note = Uracil
  modified_base 31: mod_base = OTHER; note = Uracil
  modified_base 34: mod_base = OTHER; note = Uracil
  modified_base 38: mod_base = OTHER; note = Uracil
  modified_base 43: mod_base = OTHER; note = Uracil
  modified_base 48..49: mod_base = OTHER; note = Uracil
  modified_base 54..55: mod_base = OTHER; note = Uracil
  modified_base 61: mod_base = OTHER; note = Uracil
  modified_base 70: mod_base = OTHER; note = Uracil
  modified_base 74: mod_base = OTHER; note = Uracil
  modified_base 80: mod_base = OTHER; note = Uracil
ggaggagctacgatgcggccgatttcgtaatcctccataccatcgccttaccgttccgcgtcagacgactcgctgaggatccgaca

SEQ ID NO: 61 - DNA, 86 bp, synthetic construct
  misc_feature 1..86: note = Synthetic Polynucleotide
  source 1..86: mol_type = other DNA
  modified_base 9: mod_base = OTHER; note = Uracil
  modified_base 14: mod_base = OTHER; note = Uracil
  modified_base 23..25: mod_base = OTHER; note = Uracil
  modified_base 28: mod_base = OTHER; note = Uracil
  modified_base 31: mod_base = OTHER; note = Uracil
  modified_base 34: mod_base = OTHER; note = Uracil
  modified_base 38: mod_base = OTHER; note = Uracil
  modified_base 43: mod_base = OTHER; note = Uracil
  modified_base 48..49: mod_base = OTHER; note = Uracil
  modified_base 54..55: mod_base = OTHER; note = Uracil
  modified_base 61: mod_base = OTHER; note = Uracil
  modified_base 70: mod_base = OTHER; note = Uracil
  modified_base 74: mod_base = OTHER; note = Uracil
  modified_base 80: mod_base = OTHER; note = Uracil
ggaggagctacgatgcggccgatttcgtcatcctccataccatcaccttaccgttccgcgtcagacgactcgctgaggatccgaca

SEQ ID NO: 62 - DNA, 86 bp, synthetic construct
  misc_feature 1..86: note = Synthetic Polynucleotide
  source 1..86: mol_type = other DNA
  modified_base 9: mod_base = OTHER; note = Uracil
  modified_base 14: mod_base = OTHER; note = Uracil
  modified_base 23..25: mod_base = OTHER; note = Uracil
  modified_base 28: mod_base = OTHER; note = Uracil
  modified_base 31: mod_base = OTHER; note = Uracil
  modified_base 34: mod_base = OTHER; note = Uracil
  modified_base 38: mod_base = OTHER; note = Uracil
  modified_base 43: mod_base = OTHER; note = Uracil
  modified_base 48..50: mod_base = OTHER; note = Uracil
  modified_base 54..55: mod_base = OTHER; note = Uracil
  modified_base 61: mod_base = OTHER; note = Uracil
  modified_base 70: mod_base = OTHER; note = Uracil
  modified_base 74: mod_base = OTHER; note = Uracil
  modified_base 80: mod_base = OTHER; note = Uracil
ggaggagctacgatgcggccgatttcgtcatcctccataccatcgcctttccgttccgcgtcagacgactcgctgaggatccgaca

SEQ ID NO: 63 - DNA, 86 bp, synthetic construct
  misc_feature 1..86: note = Synthetic Polynucleotide
  source 1..86: mol_type = other DNA
  modified_base 9: mod_base = OTHER; note = Uracil
  modified_base 14: mod_base = OTHER; note = Uracil
  modified_base 23: mod_base = OTHER; note = Uracil
  modified_base 27: mod_base = OTHER; note = Uracil
  modified_base 34: mod_base = OTHER; note = Uracil
  modified_base 36..37: mod_base = OTHER; note = Uracil
  modified_base 47: mod_base = OTHER; note = Uracil
  modified_base 50..51: mod_base = OTHER; note = Uracil
  modified_base 53..55: mod_base = OTHER; note = Uracil
  modified_base 61: mod_base = OTHER; note = Uracil
  modified_base 70: mod_base = OTHER; note = Uracil
  modified_base 74: mod_base = OTHER; note = Uracil
  modified_base 80: mod_base = OTHER; note = Uracil
ggaggagctacgatgcggcccatccctcccgcgtattgcgaacgcatcgttatttagccgtcagacgactcgctgaggatccgaca

SEQ ID NO: 64 - DNA, 87 bp, synthetic construct
  misc_feature 1..87: note = Synthetic Polynucleotide
  source 1..87: mol_type = other DNA
  modified_base 9: mod_base = OTHER; note = Uracil
  modified_base 14: mod_base = OTHER; note = Uracil
  modified_base 19: mod_base = OTHER; note = Uracil
  modified_base 22..23: mod_base = OTHER; note = Uracil
  modified_base 25: mod_base = OTHER; note = Uracil
  modified_base 33: mod_base = OTHER; note = Uracil
  modified_base 45: mod_base = OTHER; note = Uracil
  modified_base 51..52: mod_base = OTHER; note = Uracil
  modified_base 54..55: mod_base = OTHER; note = Uracil
  modified_base 71: mod_base = OTHER; note = Uracil
  modified_base 75: mod_base = OTHER; note = Uracil
  modified_base 81: mod_base = OTHER; note = Uracil
ggaggagctacgatgcggtaattctcaggaggtgcggaacgggatatggattgttcgccagacagacgactcgctgaggatccgaca

SEQ ID NO: 65 - DNA, 86 bp, synthetic construct
  misc_feature 1..86: note = Synthetic Polynucleotide
  source 1..86: mol_type = other DNA
  modified_base 9: mod_base = OTHER; note = Uracil
  modified_base 14: mod_base = OTHER; note = Uracil
  modified_base 23..24: mod_base = OTHER; note = Uracil
  modified_base 26..27: mod_base = OTHER; note = Uracil
  modified_base 35..37: mod_base = OTHER; note = Uracil
  modified_base 39: mod_base = OTHER; note = Uracil
  modified_base 42: mod_base = OTHER; note = Uracil
  modified_base 44..45: mod_base = OTHER; note = Uracil
  modified_base 49: mod_base = OTHER; note = Uracil
  modified_base 49: mod_base = OTHER; note = Uracil
  modified_base 54: mod_base = OTHER; note = Uracil
  modified_base 57: mod_base = OTHER; note = Uracil
  modified_base 69: mod_base = OTHER; note = Uracil
  modified_base 73: mod_base = OTHER; note = Uracil
  modified_base 79: mod_base = OTHER; note = Uracil
ggaggagctacgatgcggccgatttcgtcatcctccatcccatcgccttaccgttccgcgtcagacgactcgctgaggatccgaca

SEQ ID NO: 66 - DNA, 86 bp, synthetic construct
  misc_feature 1..86: note = Synthetic Polynucleotide
  source 1..86: mol_type = other DNA
  modified_base 9: mod_base = OTHER; note = Uracil
  modified_base 14: mod_base = OTHER; note = Uracil
  modified_base 23..25: mod_base = OTHER; note = Uracil
  modified_base 28: mod_base = OTHER; note = Uracil
  modified_base 31: mod_base = OTHER; note = Uracil
  modified_base 34: mod_base = OTHER; note = Uracil
  modified_base 38: mod_base = OTHER; note = Uracil
  modified_base 43: mod_base = OTHER; note = Uracil
  modified_base 48..49: mod_base = OTHER; note = Uracil
  modified_base 54..55: mod_base = OTHER; note = Uracil
  modified_base 61: mod_base = OTHER; note = Uracil
  modified_base 70: mod_base = OTHER; note = Uracil
  modified_base 74: mod_base = OTHER; note = Uracil
  modified_base 80: mod_base = OTHER; note = Uracil
ggaggagctacgatgcggccgatttcgtcatcatccataccatcgccttaccgttccgcgtcagacgactcgctgaggatccgaca

SEQ ID NO: 67 - DNA, 85 bp, synthetic construct
  misc_feature 1..85: note = Synthetic Polynucleotide
  source 1..85: mol_type = other DNA
  modified_base 9: mod_base = OTHER; note = Uracil
  modified_base 14: mod_base = OTHER; note = Uracil
  modified_base 19: mod_base = OTHER; note = Uracil
  modified_base 23..24: mod_base = OTHER; note = Uracil
  modified_base 26..27: mod_base = OTHER; note = Uracil
  modified_base 35..37: mod_base = OTHER; note = Uracil
  modified_base 39: mod_base = OTHER; note = Uracil
  modified_base 42: mod_base = OTHER; note = Uracil
  modified_base 44..45: mod_base = OTHER; note = Uracil
  modified_base 49: mod_base = OTHER; note = Uracil
  modified_base 54: mod_base = OTHER; note = Uracil
  modified_base 57: mod_base = OTHER; note = Uracil
  modified_base 69: mod_base = OTHER; note = Uracil
  modified_base 73: mod_base = OTHER; note = Uracil
  modified_base 79: mod_base = OTHER; note = Uracil
ggaggagctacgatgcggtgaattcttccggcactttgtcatcttcactcccatgctgcacagacgactcgctgaggatccgaca

SEQ ID NO: 68 - DNA, 86 bp, synthetic construct
  misc_feature 1..86: note = Synthetic Polynucleotide
  source 1..86: mol_type = other DNA
  modified_base 9: mod_base = OTHER; note = Uracil
  modified_base 14: mod_base = OTHER; note = Uracil
  modified_base 23..25: mod_base = OTHER; note = Uracil
  modified_base 28: mod_base = OTHER; note = Uracil
  modified_base 31: mod_base = OTHER; note = Uracil
  modified_base 34: mod_base = OTHER; note = Uracil
  modified_base 38: mod_base = OTHER; note = Uracil
  modified_base 43: mod_base = OTHER; note = Uracil
  modified_base 48..49: mod_base = OTHER; note = Uracil
  modified_base 54..55: mod_base = OTHER; note = Uracil
  modified_base 61: mod_base = OTHER; note = Uracil
  modified_base 70: mod_base = OTHER; note = Uracil
  modified_base 74: mod_base = OTHER; note = Uracil
  modified_base 80: mod_base = OTHER; note = Uracil
ggaggagctacgatgcggccgatttcgtcatcctacataccatcgccttaccgttccgcgtcagacgactcgctgaggatccgaca

SEQ ID NO: 69 - DNA, 86 bp, synthetic construct
  misc_feature 1..86: note = Synthetic Polynucleotide
  source 1..86: mol_type = other DNA
  modified_base 9: mod_base = OTHER; note = Uracil
  modified_base 14: mod_base = OTHER; note = Uracil
  modified_base 23..25: mod_base = OTHER; note = Uracil
  modified_base 28: mod_base = OTHER; note = Uracil
  modified_base 31: mod_base = OTHER; note = Uracil
  modified_base 34: mod_base = OTHER; note = Uracil
  modified_base 43: mod_base = OTHER; note = Uracil
  modified_base 38: mod_base = OTHER; note = Uracil
  modified_base 43: mod_base = OTHER; note = Uracil
  modified_base 48..49: mod_base = OTHER; note = Uracil
  modified_base 54..55: mod_base = OTHER; note = Uracil
  modified_base 61: mod_base = OTHER; note = Uracil
  modified_base 70: mod_base = OTHER; note = Uracil
  modified_base 74: mod_base = OTHER; note = Uracil
  modified_base 80: mod_base = OTHER; note = Uracil
ggaggagctacgatgcggccgatttcgtcatcctccataccatccccttaccgttccgcgtcagacgactcgctgaggatccgaca

SEQ ID NO: 70 - DNA, 86 bp, synthetic construct
  misc_feature 1..86: note = Synthetic Polynucleotide
  source 1..86: mol_type = other DNA
  modified_base 9: mod_base = OTHER; note = Uracil
  modified_base 14: mod_base = OTHER; note = Uracil
  modified_base 23..25: mod_base = OTHER; note = Uracil
  modified_base 28: mod_base = OTHER; note = Uracil
  modified_base 31: mod_base = OTHER; note = Uracil
  modified_base 38: mod_base = OTHER; note = Uracil
  modified_base 43: mod_base = OTHER; note = Uracil
  modified_base 48..49: mod_base = OTHER; note = Uracil
  modified_base 54..55: mod_base = OTHER; note = Uracil
  modified_base 61: mod_base = OTHER; note = Uracil
  modified_base 70: mod_base = OTHER; note = Uracil
  modified_base 74: mod_base = OTHER; note = Uracil
  modified_base 80: mod_base = OTHER; note = Uracil
ggaggagctacgatgcggccgatttcgtcatccaccataccatcgccttaccgttccgcgtcagacgactcgctgaggatccgaca

SEQ ID NO: 71 - DNA, 85 bp, synthetic construct
  misc_feature 1..85: note = Synthetic Polynucleotide
  source 1..85: mol_type = other DNA
  modified_base 9: mod_base = OTHER; note = Uracil
  modified_base 14: mod_base = OTHER; note = Uracil
  modified_base 22: mod_base = OTHER; note = Uracil
  modified_base 24: mod_base = OTHER; note = Uracil
  modified_base 28: mod_base = OTHER; note = Uracil
  modified_base 30: mod_base = OTHER; note = Uracil
  modified_base 33: mod_base = OTHER; note = Uracil
  modified_base 38: mod_base = OTHER; note = Uracil
  modified_base 49: mod_base = OTHER; note = Uracil
  modified_base 51: mod_base = OTHER; note = Uracil
  modified_base 53: mod_base = OTHER; note = Uracil
  modified_base 57: mod_base = OTHER; note = Uracil
  modified_base 69: mod_base = OTHER; note = Uracil
  modified_base 73: mod_base = OTHER; note = Uracil
  modified_base 79: mod_base = OTHER; note = Uracil
ggaggagctacgatgcggccgtctcgctctcatcccgtgcacgaaacctctctcactgcacagacgactcgctgaggatccgaca

SEQ ID NO: 72 - DNA, 87 bp, synthetic construct
  misc_feature 1..87: note = Synthetic Polynucleotide
  source 1..87: mol_type = other DNA
  modified_base 9: mod_base = OTHER; note = Uracil
  modified_base 14: mod_base = OTHER; note = Uracil
  modified_base 27: mod_base = OTHER; note = Uracil
  modified_base 30: mod_base = OTHER; note = Uracil
  modified_base 50: mod_base = OTHER; note = Uracil
  modified_base 54: mod_base = OTHER; note = Uracil
  modified_base 56: mod_base = OTHER; note = Uracil
  modified_base 71: mod_base = OTHER; note = Uracil
  modified_base 75: mod_base = OTHER; note = Uracil
  modified_base 81: mod_base = OTHER; note = Uracil
ggaggagctacgatgcggcaacaaactaatcagacacgagacagagagatagatctgccagacagacgactcgctgaggatccgaca

SEQ ID NO: 73 - DNA, 85 bp, synthetic construct
  misc_feature 1..85: note = Synthetic Polynucleotide
  source 1..85: mol_type = other DNA
  modified_base 9: mod_base = OTHER; note = Uracil
  modified_base 14: mod_base = OTHER; note = Uracil
  modified_base 19: mod_base = OTHER; note = Uracil
  modified_base 23..24: mod_base = OTHER; note = Uracil
  modified_base 26..27: mod_base = OTHER; note = Uracil
  modified_base 35..37: mod_base = OTHER; note = Uracil
  modified_base 39: mod_base = OTHER; note = Uracil
  modified_base 42: mod_base = OTHER; note = Uracil
  modified_base 44..45: mod_base = OTHER; note = Uracil
  modified_base 54: mod_base = OTHER; note = Uracil
  modified_base 57: mod_base = OTHER; note = Uracil
  modified_base 69: mod_base = OTHER; note = Uracil
  modified_base 73: mod_base = OTHER; note = Uracil
  modified_base 79: mod_base = OTHER; note = Uracil
ggaggagctacgatgcggtgaattcttccggcactttgtcatcttcacccccctgctgcacagacgactcgctgaggatccgaca

SEQ ID NO: 74 - DNA, 86 bp, synthetic construct
  misc_feature 1..86: note = Synthetic Polynucleotide
  source 1..86: mol_type = other DNA
  modified_base 9: mod_base = OTHER; note = Uracil
  modified_base 14: mod_base = OTHER; note = Uracil
  modified_base 23..25: mod_base = OTHER; note = Uracil
  modified_base 28: mod_base = OTHER; note = Uracil
  modified_base 31: mod_base = OTHER; note = Uracil
  modified_base 34: mod_base = OTHER; note = Uracil
  modified_base 38: mod_base = OTHER; note = Uracil
  modified_base 43: mod_base = OTHER; note = Uracil
  modified_base 48..49: mod_base = OTHER; note = Uracil
  modified_base 54..55: mod_base = OTHER; note = Uracil
  modified_base 61: mod_base = OTHER; note = Uracil
  modified_base 70: mod_base = OTHER; note = Uracil
  modified_base 74: mod_base = OTHER; note = Uracil
  modified_base 80: mod_base = OTHER; note = Uracil
ggaggagctacgatgcggccgatttcgtcatcctccataccatcgccttagcgttccgcgtcagacgactcgctgaggatccgaca

SEQ ID NO: 75 - DNA, 86 bp, synthetic construct
  misc_feature 1..86: note = Synthetic Polynucleotide
  source 1..86: mol_type = other DNA
  modified_base 9: mod_base = OTHER; note = Uracil
  modified_base 14: mod_base = OTHER; note = Uracil
  modified_base 23..25: mod_base = OTHER; note = Uracil
  modified_base 28: mod_base = OTHER; note = Uracil
  modified_base 31: mod_base = OTHER; note = Uracil
  modified_base 34: mod_base = OTHER; note = Uracil
  modified_base 38: mod_base = OTHER; note = Uracil
  modified_base 43: mod_base = OTHER; note = Uracil
  modified_base 48..49: mod_base = OTHER; note = Uracil
  modified_base 54..55: mod_base = OTHER; note = Uracil
  modified_base 61: mod_base = OTHER; note = Uracil
  modified_base 70: mod_base = OTHER; note = Uracil
  modified_base 74: mod_base = OTHER; note = Uracil
  modified_base 80: mod_base = OTHER; note = Uracil
ggaggagctacgatgcggccgatttcgtcatcctccataccatagccttaccgttccgcgtcagacgactcgctgaggatccgaca

SEQ ID NO: 76 - DNA, 86 bp, synthetic construct
  misc_feature 1..86: note = Synthetic Polynucleotide
  source 1..86: mol_type = other DNA
  modified_base 9: mod_base = OTHER; note = Uracil
  modified_base 14: mod_base = OTHER; note = Uracil
  modified_base 23..25: mod_base = OTHER; note = Uracil
  modified_base 28: mod_base = OTHER; note = Uracil
  modified_base 31: mod_base = OTHER; note = Uracil
  modified_base 34: mod_base = OTHER; note = Uracil
  modified_base 38: mod_base = OTHER; note = Uracil
  modified_base 43: mod_base = OTHER; note = Uracil
  modified_base 48..49: mod_base = OTHER; note = Uracil
  modified_base 54..55: mod_base = OTHER; note = Uracil
  modified_base 61: mod_base = OTHER; note = Uracil
  modified_base 70: mod_base = OTHER; note = Uracil
  modified_base 74: mod_base = OTHER; note = Uracil
  modified_base 80: mod_base = OTHER; note = Uracil
ggaggagctacgatgcggccgatttcgtcatcctccatacaatcgccttaccgttccgcgtcagacgactcgctgaggatccgaca

SEQ ID NO: 77 - DNA, 86 bp, synthetic construct
  misc_feature 1..86: note = Synthetic Polynucleotide
  source 1..86: mol_type = other DNA
  modified_base 9: mod_base = OTHER; note = Uracil
  modified_base 14: mod_base = OTHER; note = Uracil
  modified_base 23: mod_base = OTHER; note = Uracil
  modified_base 27: mod_base = OTHER; note = Uracil
  modified_base 34: mod_base = OTHER; note = Uracil
  modified_base 37: mod_base = OTHER; note = Uracil
  modified_base 47: mod_base = OTHER; note = Uracil
  modified_base 50..51: mod_base = OTHER; note = Uracil
  modified_base 53..55: mod_base = OTHER; note = Uracil
  modified_base 61: mod_base = OTHER; note = Uracil
  modified_base 70: mod_base = OTHER; note = Uracil
  modified_base 74: mod_base = OTHER; note = Uracil
  modified_base 80: mod_base = OTHER; note = Uracil
ggaggagctacgatgcggcccatcactcccgcgtactgcgaacgcatcgttatttagccgtcagacgactcgctgaggatccgaca

SEQ ID NO: 78 - DNA, 86 bp, synthetic construct
  misc_feature 1..86: note = Synthetic Polynucleotide
  source 1..86: mol_type = other DNA
  modified_base 9: mod_base = OTHER; note = Uracil
  modified_base 14: mod_base = OTHER; note = Uracil
  modified_base 23..25: mod_base = OTHER; note = Uracil
  modified_base 28: mod_base = OTHER; note = Uracil
  modified_base 31: mod_base = OTHER; note = Uracil
  modified_base 34: mod_base = OTHER; note = Uracil
  modified_base 38: mod_base = OTHER; note = Uracil
  modified_base 43: mod_base = OTHER; note = Uracil
  modified_base 48..49: mod_base = OTHER; note = Uracil
  modified_base 55: mod_base = OTHER; note = Uracil
  modified_base 61: mod_base = OTHER; note = Uracil
  modified_base 70: mod_base = OTHER; note = Uracil
  modified_base 74: mod_base = OTHER; note = Uracil
  modified_base 80: mod_base = OTHER; note = Uracil
ggaggagctacgatgcggccgatttcgtcatcctccataccatcgccttaccgatccgcgtcagacgactcgctgaggatccgaca

SEQ ID NO: 79 - DNA, 86 bp, synthetic construct
  misc_feature 1..86: note = Synthetic Polynucleotide
  source 1..86: mol_type = other DNA
  modified_base 9: mod_base = OTHER; note = Uracil
  modified_base 14: mod_base = OTHER; note = Uracil
  modified_base 24..25: mod_base = OTHER; note = Uracil
  modified_base 28: mod_base = OTHER; note = Uracil
  modified_base 31: mod_base = OTHER; note = Uracil
  modified_base 34: mod_base = OTHER; note = Uracil
  modified_base 38: mod_base = OTHER; note = Uracil
  modified_base 43: mod_base = OTHER; note = Uracil
  modified_base 48..49: mod_base = OTHER; note = Uracil
  modified_base 54..55: mod_base = OTHER; note = Uracil
  modified_base 61: mod_base = OTHER; note = Uracil
  modified_base 70: mod_base = OTHER; note = Uracil
  modified_base 74: mod_base = OTHER; note = Uracil
  modified_base 80: mod_base = OTHER; note = Uracil
ggaggagctacgatgcggccgaattcgtcatcctccataccatcgccttaccgttccgcgtcagacgactcgctgaggatccgaca

SEQ ID NO: 80 - DNA, 86 bp, synthetic construct
  misc_feature 1..86: note = Synthetic Polynucleotide
  source 1..86: mol_type = other DNA
  modified_base 9: mod_base = OTHER; note = Uracil
  modified_base 14: mod_base = OTHER; note = Uracil
  modified_base 23..25: mod_base = OTHER; note = Uracil
  modified_base 28: mod_base = OTHER; note = Uracil
  modified_base 31: mod_base = OTHER; note = Uracil
  modified_base 34: mod_base = OTHER; note = Uracil
  modified_base 38: mod_base = OTHER; note = Uracil
  modified_base 43: mod_base = OTHER; note = Uracil
  modified_base 48..49: mod_base = OTHER; note = Uracil
  modified_base 54..55: mod_base = OTHER; note = Uracil
  modified_base 61: mod_base = OTHER; note = Uracil
  modified_base 70: mod_base = OTHER; note = Uracil
  modified_base 74: mod_base = OTHER; note = Uracil
  modified_base 80: mod_base = OTHER; note = Uracil
ggaggagctacgatgcggccgatttcgtcatcctccataccatcgacttaccgttccgcgtcagacgactcgctgaggatccgaca

SEQ ID NO: 81 - DNA, 86 bp, synthetic construct
  misc_feature 1..86: note = Synthetic Polynucleotide
  source 1..86: mol_type = other DNA
  modified_base 9: mod_base = OTHER; note = Uracil
  modified_base 14: mod_base = OTHER; note = Uracil
  modified_base 23..25: mod_base = OTHER; note = Uracil
  modified_base 28: mod_base = OTHER; note = Uracil
  modified_base 31: mod_base = OTHER; note = Uracil
  modified_base 34: mod_base = OTHER; note = Uracil
  modified_base 38: mod_base = OTHER; note = Uracil
  modified_base 43: mod_base = OTHER; note = Uracil
  modified_base 48..49: mod_base = OTHER; note = Uracil
  modified_base 54..55: mod_base = OTHER; note = Uracil
  modified_base 61: mod_base = OTHER; note = Uracil
  modified_base 70: mod_base = OTHER; note = Uracil
  modified_base 74: mod_base = OTHER; note = Uracil
  modified_base 80: mod_base = OTHER; note = Uracil
ggaggagctacgatgcggccgatttcgtcatcctgcataccatcgccttaccgttccgcgtcagacgactcgctgaggatccgaca

SEQ ID NO: 82 - DNA, 86 bp, synthetic construct
  misc_feature 1..86: note = Synthetic Polynucleotide
  source 1..86: mol_type = other DNA
  modified_base 9: mod_base = OTHER; note = Uracil
  modified_base 14: mod_base = OTHER; note = Uracil
  modified_base 19: mod_base = OTHER; note = Uracil
  modified_base 22..23: mod_base = OTHER; note = Uracil
  modified_base 25..28: mod_base = OTHER; note = Uracil
  modified_base 31: mod_base = OTHER; note = Uracil
  modified_base 33: mod_base = OTHER; note = Uracil
  modified_base 35: mod_base = OTHER; note = Uracil
  modified_base 43..44: mod_base = OTHER; note = Uracil
  modified_base 50..52: mod_base = OTHER; note = Uracil
  modified_base 54: mod_base = OTHER; note = Uracil
  modified_base 58: mod_base = OTHER; note = Uracil
  modified_base 61: mod_base = OTHER; note = Uracil
  modified_base 70: mod_base = OTHER; note = Uracil
  modified_base 74: mod_base = OTHER; note = Uracil
  modified_base 80: mod_base = OTHER; note = Uracil
ggaggagctacgatgcggtccttgttttcctctgtaccccacttccccatttctccctgctcagacgactcgctgaggatccgaca

SEQ ID NO: 83 - DNA, 86 bp, synthetic construct
  misc_feature 1..86: note = Synthetic Polynucleotide
  source 1..86: mol_type = other DNA
  modified_base 9: mod_base = OTHER; note = Uracil
  modified_base 14: mod_base = OTHER; note = Uracil
  modified_base 23..25: mod_base = OTHER; note = Uracil
  modified_base 27..28: mod_base = OTHER; note = Uracil
  modified_base 31: mod_base = OTHER; note = Uracil
  modified_base 34: mod_base = OTHER; note = Uracil
  modified_base 38: mod_base = OTHER; note = Uracil
  modified_base 43: mod_base = OTHER; note = Uracil
  modified_base 48..49: mod_base = OTHER; note = Uracil
  modified_base 54..55: mod_base = OTHER; note = Uracil
  modified_base 61: mod_base = OTHER; note = Uracil
  modified_base 70: mod_base = OTHER; note = Uracil
  modified_base 74: mod_base = OTHER; note = Uracil
  modified_base 80: mod_base = OTHER; note = Uracil
ggaggagctacgatgcggccgatttcttcatcctccataccatcgccttaccgttccgcgtcagacgactcgctgaggatccgaca

SEQ ID NO: 84 - DNA, 86 bp, synthetic construct
  misc_feature 1..86: note = Synthetic Polynucleotide
  source 1..86: mol_type = other DNA
  modified_base 9: mod_base = OTHER; note = Uracil
  modified_base 14: mod_base = OTHER; note = Uracil
  modified_base 23..25: mod_base = OTHER; note = Uracil
  modified_base 28: mod_base = OTHER; note = Uracil
  modified_base 31: mod_base = OTHER; note = Uracil
  modified_base 34: mod_base = OTHER; note = Uracil
  modified_base 43: mod_base = OTHER; note = Uracil
  modified_base 45: mod_base = OTHER; note = Uracil
  modified_base 48..49: mod_base = OTHER; note = Uracil
  modified_base 54..55: mod_base = OTHER; note = Uracil
  modified_base 61: mod_base = OTHER; note = Uracil
  modified_base 70: mod_base = OTHER; note = Uracil
  modified_base 74: mod_base = OTHER; note = Uracil
  modified_base 80: mod_base = OTHER; note = Uracil
ggaggagctacgatgcggccgatttcgtcatcctccataccatctccttaccgttccgcgtcagacgactcgctgaggatccgaca

SEQ ID NO: 85 - DNA, 86 bp, synthetic construct
  misc_feature 1..86: note = Synthetic Polynucleotide
  source 1..86: mol_type = other DNA
  modified_base 9: mod_base = OTHER; note = Uracil
  modified_base 14: mod_base = OTHER; note = Uracil
  modified_base 23..25: mod_base = OTHER; note = Uracil
  modified_base 28: mod_base = OTHER; note = Uracil
  modified_base 31: mod_base = OTHER; note = Uracil
  modified_base 34: mod_base = OTHER; note = Uracil
  modified_base 38: mod_base = OTHER; note = Uracil
  modified_base 43: mod_base = OTHER; note = Uracil
  modified_base 48..49: mod_base = OTHER; note = Uracil
  modified_base 54..55: mod_base = OTHER; note = Uracil
  modified_base 61: mod_base = OTHER; note = Uracil
  modified_base 70: mod_base = OTHER; note = Uracil
  modified_base 74: mod_base = OTHER; note = Uracil
  modified_base 80: mod_base = OTHER; note = Uracil
ggaggagctacgatgcggccgatttcgtcatcctccataccatggccttaccgttccgcgtcagacgactcgctgaggatccgaca

SEQ ID NO: 86 - DNA, 86 bp, synthetic construct
  misc_feature 1..86: note = Synthetic Polynucleotide
  source 1..86: mol_type = other DNA
  modified_base 9: mod_base = OTHER; note = Uracil
  modified_base 14: mod_base = OTHER; note = Uracil
  modified_base 23..25: mod_base = OTHER; note = Uracil
  modified_base 31: mod_base = OTHER; note = Uracil
  modified_base 34: mod_base = OTHER; note = Uracil
  modified_base 38: mod_base = OTHER; note = Uracil
  modified_base 43: mod_base = OTHER; note = Uracil
  modified_base 48..49: mod_base = OTHER; note = Uracil
  modified_base 54..55: mod_base = OTHER; note = Uracil
  modified_base 61: mod_base = OTHER; note = Uracil
  modified_base 70: mod_base = OTHER; note = Uracil
  modified_base 74: mod_base = OTHER; note = Uracil
  modified_base 80: mod_base = OTHER; note = Uracil
ggaggagctacgatgcggccgatttcggcatcctccataccatcgccttaccgttccgcgtcagacgactcgctgaggatccgaca

SEQ ID NO: 87 - DNA, 86 bp, synthetic construct
  misc_feature 1..86: note = Synthetic Polynucleotide
  source 1..86: mol_type = other DNA
  modified_base 9: mod_base = OTHER; note = Uracil
  modified_base 14: mod_base = OTHER; note = Uracil
  modified_base 23..25: mod_base = OTHER; note = Uracil
  modified_base 28: mod_base = OTHER; note = Uracil
  modified_base 31: mod_base = OTHER; note = Uracil
  modified_base 34: mod_base = OTHER; note = Uracil
  modified_base 38: mod_base = OTHER; note = Uracil
  modified_base 43: mod_base = OTHER; note = Uracil
  modified_base 48..49: mod_base = OTHER; note = Uracil
  modified_base 54..55: mod_base = OTHER; note = Uracil
  modified_base 61: mod_base = OTHER; note = Uracil
  modified_base 70: mod_base = OTHER; note = Uracil
  modified_base 74: mod_base = OTHER; note = Uracil
  modified_base 80: mod_base = OTHER; note = Uracil
ggaggagctacgatgcggccgatttcgtgatcctccataccatcgccttaccgttccgcgtcagacgactcgctgaggatccgaca

SEQ ID NO: 88 - DNA, 86 bp, synthetic construct
  misc_feature 1..86: note = Synthetic Polynucleotide
  source 1..86: mol_type = other DNA
  modified_base 9: mod_base = OTHER; note = Uracil
  modified_base 14: mod_base = OTHER; note = Uracil
  modified_base 23..25: mod_base = OTHER; note = Uracil
  modified_base 28: mod_base = OTHER; note = Uracil
  modified_base 31: mod_base = OTHER; note = Uracil
  modified_base 34: mod_base = OTHER; note = Uracil
  modified_base 38: mod_base = OTHER; note = Uracil
  modified_base 43: mod_base = OTHER; note = Uracil
  modified_base 48..49: mod_base = OTHER; note = Uracil
  modified_base 54: mod_base = OTHER; note = Uracil
  modified_base 61: mod_base = OTHER; note = Uracil
  modified_base 70: mod_base = OTHER; note = Uracil
  modified_base 74: mod_base = OTHER; note = Uracil
  modified_base 80: mod_base = OTHER; note = Uracil
ggaggagctacgatgcggccgatttcgtcatcctccataccatcgccttaccgtaccgcgtcagacgactcgctgaggatccgaca

SEQ ID NO: 89 - DNA, 84 bp, synthetic construct
  misc_feature 1..84: note = Synthetic Polynucleotide
  source 1..84: mol_type = other DNA
  modified_base 9: mod_base = OTHER; note = Uracil
  modified_base 14: mod_base = OTHER; note = Uracil
  modified_base 27: mod_base = OTHER; note = Uracil
  modified_base 30..31: mod_base = OTHER; note = Uracil
  modified_base 34: mod_base = OTHER; note = Uracil
  modified_base 37: mod_base = OTHER; note = Uracil
  modified_base 45: mod_base = OTHER; note = Uracil
  modified_base 54..55: mod_base = OTHER; note = Uracil
  modified_base 68: mod_base = OTHER; note = Uracil
  modified_base 72: mod_base = OTHER; note = Uracil
  modified_base 78: mod_base = OTHER; note = Uracil
ggaggagctacgatgcggacggaggatagttgctaatcgagccctgccgacgcttcagacagacgactcgctgaggatccgaca

SEQ ID NO: 90 - DNA, 86 bp, synthetic construct
  misc_feature 1..86: note = Synthetic Polynucleotide
  source 1..86: mol_type = other DNA
  modified_base 9: mod_base = OTHER; note = Uracil
  modified_base 14: mod_base = OTHER; note = Uracil
  modified_base 23..25: mod_base = OTHER; note = Uracil
  modified_base 28: mod_base = OTHER; note = Uracil
  modified_base 31: mod_base = OTHER; note = Uracil
  modified_base 34: mod_base = OTHER; note = Uracil
  modified_base 38: mod_base = OTHER; note = Uracil
  modified_base 43: mod_base = OTHER; note = Uracil
  modified_base 48: mod_base = OTHER; note = Uracil
  modified_base 54..55: mod_base = OTHER; note = Uracil
  modified_base 61: mod_base = OTHER; note = Uracil
  modified_base 70: mod_base = OTHER; note = Uracil
  modified_base 74: mod_base = OTHER; note = Uracil
  modified_base 80: mod_base = OTHER; note = Uracil
ggaggagctacgatgcggccgatttcgtcatcctccgtaccatcgcctcaccgttccgcgtcagacgactcgctgaggatccgaca

SEQ ID NO: 91 - DNA, 86 bp, synthetic construct
  misc_feature 1..86: note = Synthetic Polynucleotide
  source 1..86: mol_type = other DNA
  modified_base 9: mod_base = OTHER; note = Uracil
  modified_base 14: mod_base = OTHER; note = Uracil
  modified_base 23..25: mod_base = OTHER; note = Uracil
  modified_base 28: mod_base = OTHER; note = Uracil
  modified_base 31: mod_base = OTHER; note = Uracil
  modified_base 34: mod_base = OTHER; note = Uracil
  modified_base 38: mod_base = OTHER; note = Uracil
  modified_base 43: mod_base = OTHER; note = Uracil
  modified_base 48..49: mod_base = OTHER; note = Uracil
  modified_base 54..55: mod_base = OTHER; note = Uracil
  modified_base 61: mod_base = OTHER; note = Uracil
  modified_base 70: mod_base = OTHER; note = Uracil
  modified_base 74: mod_base = OTHER; note = Uracil
  modified_base 80: mod_base = OTHER; note = Uracil
ggaggagctacgatgcggccgatttcgtcatcctccataccatcgccttacagttccgcgtcagacgactcgctgaggatccgaca

SEQ ID NO: 92 - DNA, 85 bp, synthetic construct
  misc_feature 1..85: note = Synthetic Polynucleotide
  source 1..85: mol_type = other DNA
  modified_base 9: mod_base = OTHER; note = Uracil
  modified_base 14: mod_base = OTHER; note = Uracil
  modified_base 23..25: mod_base = OTHER; note = Uracil
  modified_base 28: mod_base = OTHER; note = Uracil
  modified_base 31: mod_base = OTHER; note = Uracil
  modified_base 34: mod_base = OTHER; note = Uracil
  modified_base 38: mod_base = OTHER; note = Uracil
  modified_base 43: mod_base = OTHER; note = Uracil
  modified_base 47..48: mod_base = OTHER; note = Uracil
  modified_base 53..54: mod_base = OTHER; note = Uracil
  modified_base 60: mod_base = OTHER; note = Uracil
  modified_base 69: mod_base = OTHER; note = Uracil
  modified_base 73: mod_base = OTHER; note = Uracil
  modified_base 79: mod_base = OTHER; note = Uracil
ggaggagctacgatgcggccgatttcgtcatcctccataccatcccttaccgttccgcgtcagacgactcgctgaggatccgaca

SEQ ID NO: 93 - DNA, 86 bp, synthetic construct
  misc_feature 1..86: note = Synthetic Polynucleotide
  source 1..86: mol_type = other DNA
  modified_base 9: mod_base = OTHER; note = Uracil
  modified_base 14: mod_base = OTHER; note = Uracil
  modified_base 23..25: mod_base = OTHER; note = Uracil
  modified_base 28: mod_base = OTHER; note = Uracil
  modified_base 31: mod_base = OTHER; note = Uracil
  modified_base 34: mod_base = OTHER; note = Uracil
  modified_base 38: mod_base = OTHER; note = Uracil
  modified_base 43: mod_base = OTHER; note = Uracil
  modified_base 48: mod_base = OTHER; note = Uracil
  modified_base 54..55: mod_base = OTHER; note = Uracil
  modified_base 61: mod_base = OTHER; note = Uracil
  modified_base 70: mod_base = OTHER; note = Uracil
  modified_base 74: mod_base = OTHER; note = Uracil
  modified_base 80: mod_base = OTHER; note = Uracil
ggaggagctacgatgcggccgatttcgtcatcctccataccatcgcctgaccgttccgcgtcagacgactcgctgaggatccgaca

SEQ ID NO: 94 - DNA, 86 bp, synthetic construct
  misc_feature 1..86: note = Synthetic Polynucleotide
  source 1..86: mol_type = other DNA
  modified_base 9: mod_base = OTHER; note = Uracil
  modified_base 14: mod_base = OTHER; note = Uracil
  modified_base 23..25: mod_base = OTHER; note = Uracil
  modified_base 28: mod_base = OTHER; note = Uracil
  modified_base 31: mod_base = OTHER; note = Uracil
  modified_base 34: mod_base = OTHER; note = Uracil
  modified_base 38: mod_base = OTHER; note = Uracil
  modified_base 43: mod_base = OTHER; note = Uracil
  modified_base 48..49: mod_base = OTHER; note = Uracil
  modified_base 54..55: mod_base = OTHER; note = Uracil
  modified_base 61: mod_base = OTHER; note = Uracil
  modified_base 70: mod_base = OTHER; note = Uracil
  modified_base 74: mod_base = OTHER; note = Uracil
  modified_base 80: mod_base = OTHER; note = Uracil
ggaggagctacgatgcggccgatttcgtcatcctccataccatcgccttaacgttccgcgtcagacgactcgctgaggatccgaca

SEQ ID NO: 95 - DNA, 86 bp, synthetic construct
  misc_feature 1..86: note = Synthetic Polynucleotide
  source 1..86: mol_type = other DNA
  modified_base 9: mod_base = OTHER; note = Uracil
  modified_base 14: mod_base = OTHER; note = Uracil
  modified_base 23..25: mod_base = OTHER; note = Uracil
  modified_base 28: mod_base = OTHER; note = Uracil
  modified_base 31: mod_base = OTHER; note = Uracil
  modified_base 34: mod_base = OTHER; note = Uracil
  modified_base 38: mod_base = OTHER; note = Uracil
  modified_base 43: mod_base = OTHER; note = Uracil
  modified_base 48..49: mod_base = OTHER; note = Uracil
  modified_base 55: mod_base = OTHER; note = Uracil
  modified_base 61: mod_base = OTHER; note = Uracil
  modified_base 70: mod_base = OTHER; note = Uracil
  modified_base 74: mod_base = OTHER; note = Uracil
  modified_base 80: mod_base = OTHER; note = Uracil
ggaggagctacgatgcggccgatttcgtcatcctccataccatcgccttaccggtccgcgtcagacgactcgctgaggatccgaca

SEQ ID NO: 96 - DNA, 85 bp, synthetic construct
  misc_feature 1..85: note = Synthetic Polynucleotide
  source 1..85: mol_type = other DNA
  modified_base 9: mod_base = OTHER; note = Uracil
  modified_base 14: mod_base = OTHER; note = Uracil
  modified_base 23..24: mod_base = OTHER; note = Uracil
  modified_base 27: mod_base = OTHER; note = Uracil
  modified_base 30: mod_base = OTHER; note = Uracil
  modified_base 33: mod_base = OTHER; note = Uracil
  modified_base 37: mod_base = OTHER; note = Uracil
  modified_base 42: mod_base = OTHER; note = Uracil
  modified_base 47..48: mod_base = OTHER; note = Uracil
  modified_base 53..54: mod_base = OTHER; note = Uracil
  modified_base 60: mod_base = OTHER; note = Uracil
  modified_base 69: mod_base = OTHER; note = Uracil
  modified_base 73: mod_base = OTHER; note = Uracil
  modified_base 79: mod_base = OTHER; note = Uracil
ggaggagctacgatgcggccgattcgtcatcctccataccatcgccttaccgttccgcgtcagacgactcgctgaggatccgaca

SEQ ID NO: 97 - DNA, 85 bp, synthetic construct
  misc_feature 1..85: note = Synthetic Polynucleotide
  source 1..85: mol_type = other DNA
  modified_base 9: mod_base = OTHER; note = Uracil
  modified_base 14: mod_base = OTHER; note = Uracil
  modified_base 23..25: mod_base = OTHER; note = Uracil
  modified_base 28: mod_base = OTHER; note = Uracil
  modified_base 31: mod_base = OTHER; note = Uracil
  modified_base 34: mod_base = OTHER; note = Uracil
  modified_base 38: mod_base = OTHER; note = Uracil
  modified_base 43: mod_base = OTHER; note = Uracil
  modified_base 48..49: mod_base = OTHER; note = Uracil
  modified_base 54: mod_base = OTHER; note = Uracil
  modified_base 60: mod_base = OTHER; note = Uracil
  modified_base 69: mod_base = OTHER; note = Uracil
  modified_base 73: mod_base = OTHER; note = Uracil
  modified_base 79: mod_base = OTHER; note = Uracil
ggaggagctacgatgcggccgatttcgtcatcctccataccatcgccttaccgtccgcgtcagacgactcgctgaggatccgaca

SEQ ID NO: 98 - DNA, 85 bp, synthetic construct
  misc_feature 1..85: note = Synthetic Polynucleotide
  source 1..85: mol_type = other DNA
  modified_base 9: mod_base = OTHER; note = Uracil
  modified_base 14: mod_base = OTHER; note = Uracil
  modified_base 19: mod_base = OTHER; note = Uracil
  modified_base 23..24: mod_base = OTHER; note = Uracil
  modified_base 26..27: mod_base = OTHER; note = Uracil
  modified_base 35..37: mod_base = OTHER; note = Uracil
  modified_base 39: mod_base = OTHER; note = Uracil
  modified_base 42: mod_base = OTHER; note = Uracil
  modified_base 44..45: mod_base = OTHER; note = Uracil
  modified_base 54: mod_base = OTHER; note = Uracil
  modified_base 57: mod_base = OTHER; note = Uracil
  modified_base 69: mod_base = OTHER; note = Uracil
  modified_base 73: mod_base = OTHER; note = Uracil
  modified_base 79: mod_base = OTHER; note = Uracil
ggaggagctacgatgcggtgaattcttccggcactttgtcatcttcacccccatgctgcgcagacgactcgctgaggatccgaca

SEQ ID NO: 99 - DNA, 86 bp, synthetic construct
  misc_feature 1..86: note = Synthetic Polynucleotide
  source 1..86: mol_type = other DNA
  modified_base 9: mod_base = OTHER; note = Uracil
  modified_base 14: mod_base = OTHER; note = Uracil
  modified_base 23..25: mod_base = OTHER; note = Uracil
  modified_base 28: mod_base = OTHER; note = Uracil
  modified_base 31: mod_base = OTHER; note = Uracil
  modified_base 34: mod_base = OTHER; note = Uracil
  modified_base 38: mod_base = OTHER; note = Uracil
  modified_base 48..49: mod_base = OTHER; note = Uracil
  modified_base 54..55: mod_base = OTHER; note = Uracil
  modified_base 61: mod_base = OTHER; note = Uracil
  modified_base 70: mod_base = OTHER; note = Uracil
  modified_base 74: mod_base = OTHER; note = Uracil
  modified_base 80: mod_base = OTHER; note = Uracil
ggaggagctacgatgcggccgatttcgtcatcctccataccaacgccttaccgttccgcgtcagacgactcgctgaggatccgaca

SEQ ID NO: 100 - DNA, 86 bp, synthetic construct
  misc_feature 1..86: note = Synthetic Polynucleotide
  source 1..86: mol_type = other DNA
  modified_base 9: mod_base = OTHER; note = Uracil
  modified_base 14: mod_base = OTHER; note = Uracil
  modified_base 23..25: mod_base = OTHER; note = Uracil
  modified_base 28: mod_base = OTHER; note = Uracil
  modified_base 31: mod_base = OTHER; note = Uracil
  modified_base 34: mod_base = OTHER; note = Uracil
  modified_base 38: mod_base = OTHER; note = Uracil
  modified_base 43: mod_base = OTHER; note = Uracil
  modified_base 48..49: mod_base = OTHER; note = Uracil
  modified_base 54..55: mod_base = OTHER; note = Uracil
  modified_base 61: mod_base = OTHER; note = Uracil
  modified_base 70: mod_base = OTHER; note = Uracil
  modified_base 74: mod_base = OTHER; note = Uracil
  modified_base 80: mod_base = OTHER; note = Uracil
ggaggagctacgatgcggccgatttcgtcatcctccataccctcgccttaccgttccgcgtcagacgactcgctgaggatccgaca

SEQ ID NO: 101 - DNA, 85 bp, synthetic construct
  misc_feature 1..85: note = Synthetic Polynucleotide
  source 1..85: mol_type = other DNA
  modified_base 9: mod_base = OTHER; note = Uracil
  modified_base 14: mod_base = OTHER; note = Uracil
  modified_base 23..24: mod_base = OTHER; note = Uracil
  modified_base 26..27: mod_base = OTHER; note = Uracil
  modified_base 35..37: mod_base = OTHER; note = Uracil
  modified_base 39: mod_base = OTHER; note = Uracil
  modified_base 42: mod_base = OTHER; note = Uracil
  modified_base 44..45: mod_base = OTHER; note = Uracil
  modified_base 50: mod_base = OTHER; note = Uracil
  modified_base 54: mod_base = OTHER; note = Uracil
  modified_base 54: mod_base = OTHER; note = Uracil
  modified_base 69: mod_base = OTHER; note = Uracil
  modified_base 73: mod_base = OTHER; note = Uracil
  modified_base 79: mod_base = OTHER; note = Uracil
ggaggagctacgatgcggtgaattcttccggcactttgtcatcttcacctccatgctgcacagacgactcgctgaggatccgaca

SEQ ID NO: 102 - DNA, 86 bp, synthetic construct
  misc_feature 1..86: note = Synthetic Polynucleotide
  source 1..86: mol_type = other DNA
  modified_base 9: mod_base = OTHER; note = Uracil
  modified_base 14: mod_base = OTHER; note = Uracil
  modified_base 23..25: mod_base = OTHER; note = Uracil
  modified_base 28: mod_base = OTHER; note = Uracil
  modified_base 31: mod_base = OTHER; note = Uracil
  modified_base 34: mod_base = OTHER; note = Uracil
  modified_base 38: mod_base = OTHER; note = Uracil
  modified_base 43: mod_base = OTHER; note = Uracil
  modified_base 48..49: mod_base = OTHER; note = Uracil
  modified_base 54..55: mod_base = OTHER; note = Uracil
  modified_base 61: mod_base = OTHER; note = Uracil
  modified_base 70: mod_base = OTHER; note = Uracil
  modified_base 74: mod_base = OTHER; note = Uracil
  modified_base 80: mod_base = OTHER; note = Uracil
ggaggagctacgatgcggccgatttcgtcatcctccataccatcggcttaccgttccgcgtcagacgactcgctgaggatccgaca

SEQ ID NO: 103 - DNA, 85 bp, synthetic construct
  misc_feature 1..85: note = Synthetic Polynucleotide
  source 1..85: mol_type = other DNA
  modified_base 9: mod_base = OTHER; note = Uracil
  modified_base 14: mod_base = OTHER; note = Uracil
  modified_base 22: mod_base = OTHER; note = Uracil
  modified_base 24: mod_base = OTHER; note = Uracil
  modified_base 28: mod_base = OTHER; note = Uracil
  modified_base 30: mod_base = OTHER; note = Uracil
  modified_base 33: mod_base = OTHER; note = Uracil
  modified_base 38: mod_base = OTHER; note = Uracil
  modified_base 49: mod_base = OTHER; note = Uracil
  modified_base 51: mod_base = OTHER; note = Uracil
  modified_base 53: mod_base = OTHER; note = Uracil
  modified_base 57: mod_base = OTHER; note = Uracil
  modified_base 69: mod_base = OTHER; note = Uracil
  modified_base 73: mod_base = OTHER; note = Uracil
  modified_base 79: mod_base = OTHER; note = Uracil
ggaggagctacgatgcggccgtctcgctctcatcccatgcacgaaacctctctcgctgcacagacgactcgctgaggatccgaca

SEQ ID NO: 104 - DNA, 85 bp, synthetic construct
  misc_feature 1..85: note = Synthetic Polynucleotide
  source 1..85: mol_type = other DNA
  modified_base 9: mod_base = OTHER; note = Uracil
  modified_base 14: mod_base = OTHER; note = Uracil
  modified_base 23..25: mod_base = OTHER; note = Uracil
  modified_base 27: mod_base = OTHER; note = Uracil
  modified_base 30: mod_base = OTHER; note = Uracil
  modified_base 33: mod_base = OTHER; note = Uracil
  modified_base 37: mod_base = OTHER; note = Uracil
  modified_base 42: mod_base = OTHER; note = Uracil
  modified_base 47..48: mod_base = OTHER; note = Uracil
  modified_base 53..54: mod_base = OTHER; note = Uracil
  modified_base 60: mod_base = OTHER; note = Uracil
  modified_base 69: mod_base = OTHER; note = Uracil
  modified_base 73: mod_base = OTHER; note = Uracil
  modified_base 79: mod_base = OTHER; note = Uracil
ggaggagctacgatgcggccgatttgtcatcctccataccatcgccttaccgttccgcgtcagacgactcgctgaggatccgaca

SEQ ID NO: 105 - DNA, 85 bp, synthetic construct
  misc_feature 1..85: note = Synthetic Polynucleotide
  source 1..85: mol_type = other DNA
  modified_base 9: mod_base = OTHER; note = Uracil
  modified_base 14: mod_base = OTHER; note = Uracil
  modified_base 19: mod_base = OTHER; note = Uracil
  modified_base 23..24: mod_base = OTHER; note = Uracil
  modified_base 26..27: mod_base = OTHER; note = Uracil
  modified_base 35..37: mod_base = OTHER; note = Uracil
  modified_base 39: mod_base = OTHER; note = Uracil
  modified_base 42: mod_base = OTHER; note = Uracil
  modified_base 44..45: mod_base = OTHER; note = Uracil
  modified_base 57: mod_base = OTHER; note = Uracil
  modified_base 69: mod_base = OTHER; note = Uracil
  modified_base 73: mod_base = OTHER; note = Uracil
  modified_base 79: mod_base = OTHER; note = Uracil
ggaggagctacgatgcggtgaattcttccggcactttgtcatcttcacccccacgctgcacagacgactcgctgaggatccgaca

SEQ ID NO: 106 - DNA, 86 bp, synthetic construct
  misc_feature 1..86: note = Synthetic Polynucleotide
  source 1..86: mol_type = other DNA
  modified_base 9: mod_base = OTHER; note = Uracil
  modified_base 14: mod_base = OTHER; note = Uracil
  modified_base 23..24: mod_base = OTHER; note = Uracil
  modified_base 28: mod_base = OTHER; note = Uracil
  modified_base 31: mod_base = OTHER; note = Uracil
  modified_base 34: mod_base = OTHER; note = Uracil
  modified_base 38: mod_base = OTHER; note = Uracil
  modified_base 43: mod_base = OTHER; note = Uracil
  modified_base 48..49: mod_base = OTHER; note = Uracil
  modified_base 54..55: mod_base = OTHER; note = Uracil
  modified_base 61: mod_base = OTHER; note = Uracil
  modified_base 70: mod_base = OTHER; note = Uracil
  modified_base 74: mod_base = OTHER; note = Uracil
  modified_base 80: mod_base = OTHER; note = Uracil
ggaggagctacgatgcggccgattacgtcatcctccataccatcgccttaccgttccgcgtcagacgactcgctgaggatccgaca

SEQ ID NO: 107 - DNA, 86 bp, synthetic construct
  misc_feature 1..86: note = Synthetic Polynucleotide
  source 1..86: mol_type = other DNA
  modified_base 9: mod_base = OTHER; note = Uracil
  modified_base 14: mod_base = OTHER; note = Uracil
  modified_base 23..25: mod_base = OTHER; note = Uracil
  modified_base 31: mod_base = OTHER; note = Uracil
  modified_base 34: mod_base = OTHER; note = Uracil
  modified_base 38: mod_base = OTHER; note = Uracil
  modified_base 43: mod_base = OTHER; note = Uracil
  modified_base 48: mod_base = OTHER; note = Uracil
  modified_base 54..55: mod_base = OTHER; note = Uracil
  modified_base 61: mod_base = OTHER; note = Uracil
  modified_base 70: mod_base = OTHER; note = Uracil
  modified_base 74: mod_base = OTHER; note = Uracil
  modified_base 80: mod_base = OTHER; note = Uracil
ggaggagctacgatgcggccgatttcgccatcctccataccatcgcctcaccgttccgcgtcagacgactcgctgaggatccgaca

SEQ ID NO: 108 - DNA, 86 bp, synthetic construct
  misc_feature 1..86: note = Synthetic Polynucleotide
  source 1..86: mol_type = other DNA
  modified_base 9: mod_base = OTHER; note = Uracil
  modified_base 14: mod_base = OTHER; note = Uracil
  modified_base 23..25: mod_base = OTHER; note = Uracil
  modified_base 31: mod_base = OTHER; note = Uracil
  modified_base 34: mod_base = OTHER; note = Uracil
  modified_base 38: mod_base = OTHER; note = Uracil
  modified_base 43: mod_base = OTHER; note = Uracil
  modified_base 48..49: mod_base = OTHER; note = Uracil
  modified_base 54..55: mod_base = OTHER; note = Uracil
  modified_base 61: mod_base = OTHER; note = Uracil
  modified_base 70: mod_base = OTHER; note = Uracil
  modified_base 74: mod_base = OTHER; note = Uracil
  modified_base 80: mod_base = OTHER; note = Uracil
ggaggagctacgatgcggccgatttcgacatcctccataccatcgccttaccgttccgcgtcagacgactcgctgaggatccgaca

SEQ ID NO: 109 - DNA, 85 bp, synthetic construct
  misc_feature 1..85: note = Synthetic Polynucleotide
  source 1..85: mol_type = other DNA
  modified_base 9: mod_base = OTHER; note = Uracil
  modified_base 14: mod_base = OTHER; note = Uracil
  modified_base 23..25: mod_base = OTHER; note = Uracil
  modified_base 28: mod_base = OTHER; note = Uracil
  modified_base 31: mod_base = OTHER; note = Uracil
  modified_base 34: mod_base = OTHER; note = Uracil
  modified_base 38: mod_base = OTHER; note = Uracil
  modified_base 42: mod_base = OTHER; note = Uracil
  modified_base 47..48: mod_base = OTHER; note = Uracil
  modified_base 53..54: mod_base = OTHER; note = Uracil
  modified_base 60: mod_base = OTHER; note = Uracil
  modified_base 69: mod_base = OTHER; note = Uracil
  modified_base 73: mod_base = OTHER; note = Uracil
  modified_base 79: mod_base = OTHER; note = Uracil
ggaggagctacgatgcggccgatttcgtcatcctccatacatcgccttaccgttccgcgtcagacgactcgctgaggatccgaca

SEQ ID NO: 110 - DNA, 86 bp, synthetic construct
  misc_feature 1..86: note = Synthetic Polynucleotide
  source 1..86: mol_type = other DNA
  modified_base 9: mod_base = OTHER; note = Uracil
  modified_base 14: mod_base = OTHER; note = Uracil
  modified_base 23..25: mod_base = OTHER; note = Uracil
  modified_base 28: mod_base = OTHER; note = Uracil
  modified_base 31: mod_base = OTHER; note = Uracil
  modified_base 34: mod_base = OTHER; note = Uracil
  modified_base 38: mod_base = OTHER; note = Uracil
  modified_base 48..49: mod_base = OTHER; note = Uracil
  modified_base 43: mod_base = OTHER; note = Uracil
  modified_base 54..55: mod_base = OTHER; note = Uracil
  modified_base 61: mod_base = OTHER; note = Uracil
  modified_base 70: mod_base = OTHER; note = Uracil
  modified_base 74: mod_base = OTHER; note = Uracil
  modified_base 80: mod_base = OTHER; note = Uracil
ggaggagctacgatgcggccgatttcgtcatcctccatacgatcgccttaccgttccgcgtcagacgactcgctgaggatccgaca

SEQ ID NO: 111 - DNA, 86 bp, synthetic construct
  misc_feature 1..86: note = Synthetic Polynucleotide
  source 1..86: mol_type = other DNA
  modified_base 9: mod_base = OTHER; note = Uracil
  modified_base 14: mod_base = OTHER; note = Uracil
  modified_base 23..25: mod_base = OTHER; note = Uracil
  modified_base 28: mod_base = OTHER; note = Uracil
  modified_base 31: mod_base = OTHER; note = Uracil
  modified_base 34: mod_base = OTHER; note = Uracil
  modified_base 38: mod_base = OTHER; note = Uracil
  modified_base 43: mod_base = OTHER; note = Uracil
  modified_base 48..49: mod_base = OTHER; note = Uracil
  modified_base 54..55: mod_base = OTHER; note = Uracil
  modified_base 61: mod_base = OTHER; note = Uracil
  modified_base 70: mod_base = OTHER; note = Uracil
  modified_base 74: mod_base = OTHER; note = Uracil
  modified_base 80: mod_base = OTHER; note = Uracil
ggaggagctacgatgcggccgatttcgtcatcctccgtaccatcgccttaccattccgcgtcagacgactcgctgaggatccgaca

SEQ ID NO: 112 - DNA, 85 bp, synthetic construct
  misc_feature 1..85: note = Synthetic Polynucleotide
  source 1..85: mol_type = other DNA
  modified_base 9: mod_base = OTHER; note = Uracil
  modified_base 14: mod_base = OTHER; note = Uracil
  modified_base 23..25: mod_base = OTHER; note = Uracil
  modified_base 28: mod_base = OTHER; note = Uracil
  modified_base 31: mod_base = OTHER; note = Uracil
  modified_base 37: mod_base = OTHER; note = Uracil
  modified_base 42: mod_base = OTHER; note = Uracil
  modified_base 47..48: mod_base = OTHER; note = Uracil
  modified_base 53..54: mod_base = OTHER; note = Uracil
  modified_base 60: mod_base = OTHER; note = Uracil
  modified_base 69: mod_base = OTHER; note = Uracil
  modified_base 73: mod_base = OTHER; note = Uracil
  modified_base 79: mod_base = OTHER; note = Uracil
ggaggagctacgatgcggccgatttcgtcatccccataccatcgccttaccgttccgcgtcagacgactcgctgaggatccgaca

SEQ ID NO: 113 - DNA, 86 bp, synthetic construct
  misc_feature 1..86: note = Synthetic Polynucleotide
  source 1..86: mol_type = other DNA
  modified_base 9: mod_base = OTHER; note = Uracil
  modified_base 14: mod_base = OTHER; note = Uracil
  modified_base 23..25: mod_base = OTHER; note = Uracil
  modified_base 28: mod_base = OTHER; note = Uracil
  modified_base 31: mod_base = OTHER; note = Uracil
  modified_base 34: mod_base = OTHER; note = Uracil
  modified_base 38: mod_base = OTHER; note = Uracil
  modified_base 43: mod_base = OTHER; note = Uracil
  modified_base 48..49: mod_base = OTHER; note = Uracil
  modified_base 54..55: mod_base = OTHER; note = Uracil
  modified_base 61: mod_base = OTHER; note = Uracil
  modified_base 70: mod_base = OTHER; note = Uracil
  modified_base 74: mod_base = OTHER; note = Uracil
  modified_base 80: mod_base = OTHER; note = Uracil
ggaggagctacgatgcggccgatttcgtcatcctccataccttcgccttaccgttccgcgtcagacgactcgctgaggatccgaca

SEQ ID NO: 114 - DNA, 86 bp, synthetic construct
  misc_feature 1..86: note = Synthetic Polynucleotide
  source 1..86: mol_type = other DNA
  modified_base 9: mod_base = OTHER; note = Uracil
  modified_base 14: mod_base = OTHER; note = Uracil
  modified_base 23..25: mod_base = OTHER; note = Uracil
  modified_base 28: mod_base = OTHER; note = Uracil
  modified_base 31: mod_base = OTHER; note = Uracil
  modified_base 34: mod_base = OTHER; note = Uracil
  modified_base 38: mod_base = OTHER; note = Uracil
  modified_base 43: mod_base = OTHER; note = Uracil
  modified_base 48..49: mod_base = OTHER; note = Uracil
  modified_base 54..55: mod_base = OTHER; note = Uracil
  modified_base 61: mod_base = OTHER; note = Uracil
  modified_base 70: mod_base = OTHER; note = Uracil
  modified_base 74: mod_base = OTHER; note = Uracil
  modified_base 80: mod_base = OTHER; note = Uracil
ggaggagctacgatgcggccgatttcgtcatgctccataccatcgccttaccgttccgcgtcagacgactcgctgaggatccgaca

SEQ ID NO: 115 - DNA, 86 bp, synthetic construct
  misc_feature 1..86: note = Synthetic Polynucleotide
  source 1..86: mol_type = other DNA
  modified_base 9: mod_base = OTHER; note = Uracil
  modified_base 14: mod_base = OTHER; note = Uracil
  modified_base 23: mod_base = OTHER; note = Uracil
  modified_base 27: mod_base = OTHER; note = Uracil
  modified_base 36..37: mod_base = OTHER; note = Uracil
  modified_base 47: mod_base = OTHER; note = Uracil
  modified_base 50..51: mod_base = OTHER; note = Uracil
  modified_base 53..55: mod_base = OTHER; note = Uracil
  modified_base 61: mod_base = OTHER; note = Uracil
  modified_base 70: mod_base = OTHER; note = Uracil
  modified_base 74: mod_base = OTHER; note = Uracil
  modified_base 80: mod_base = OTHER; note = Uracil
ggaggagctacgatgcggcccatcactcccgcgcattgcgaacgcatcgttatttagccgtcagacgactcgctgaggatccgaca

SEQ ID NO: 116 - DNA, 85 bp, synthetic construct
  misc_feature 1..85: note = Synthetic Polynucleotide
  source 1..85: mol_type = other DNA
  modified_base 9: mod_base = OTHER; note = Uracil
  modified_base 14: mod_base = OTHER; note = Uracil
  modified_base 23..25: mod_base = OTHER; note = Uracil
  modified_base 28: mod_base = OTHER; note = Uracil
  modified_base 31: mod_base = OTHER; note = Uracil
  modified_base 33: mod_base = OTHER; note = Uracil
  modified_base 37: mod_base = OTHER; note = Uracil
  modified_base 42: mod_base = OTHER; note = Uracil
  modified_base 47..48: mod_base = OTHER; note = Uracil
  modified_base 53..54: mod_base = OTHER; note = Uracil
  modified_base 60: mod_base = OTHER; note = Uracil
  modified_base 69: mod_base = OTHER; note = Uracil
  modified_base 73: mod_base = OTHER; note = Uracil
  modified_base 79: mod_base = OTHER; note = Uracil
ggaggagctacgatgcggccgatttcgtcatctccataccatcgccttaccgttccgcgtcagacgactcgctgaggatccgaca

SEQ ID NO: 117 - DNA, 85 bp, synthetic construct
  misc_feature 1..85: note = Synthetic Polynucleotide
  source 1..85: mol_type = other DNA
  modified_base 9: mod_base = OTHER; note = Uracil
  modified_base 14: mod_base = OTHER; note = Uracil
  modified_base 19: mod_base = OTHER; note = Uracil
  modified_base 23..24: mod_base = OTHER; note = Uracil
  modified_base 26..27: mod_base = OTHER; note = Uracil
  modified_base 35..37: mod_base = OTHER; note = Uracil
  modified_base 39: mod_base = OTHER; note = Uracil
  modified_base 42: mod_base = OTHER; note = Uracil
  modified_base 44..45: mod_base = OTHER; note = Uracil
  modified_base 54: mod_base = OTHER; note = Uracil
  modified_base 69: mod_base = OTHER; note = Uracil
  modified_base 73: mod_base = OTHER; note = Uracil
  modified_base 79: mod_base = OTHER; note = Uracil
ggaggagctacgatgcggtgaattcttccggcactttgtcatcttcacccccatgccgcacagacgactcgctgaggatccgaca

SEQ ID NO: 118 - DNA, 86 bp, synthetic construct
  misc_feature 1..86: note = Synthetic Polynucleotide
  source 1..86: mol_type = other DNA
  modified_base 9: mod_base = OTHER; note = Uracil
  modified_base 14: mod_base = OTHER; note = Uracil
  modified_base 23: mod_base = OTHER; note = Uracil
  modified_base 27: mod_base = OTHER; note = Uracil
  modified_base 34: mod_base = OTHER; note = Uracil
  modified_base 36..37: mod_base = OTHER; note = Uracil
  modified_base 47: mod_base = OTHER; note = Uracil
  modified_base 50..51: mod_base = OTHER; note = Uracil
  modified_base 53..55: mod_base = OTHER; note = Uracil
  modified_base 61: mod_base = OTHER; note = Uracil
  modified_base 70: mod_base = OTHER; note = Uracil
  modified_base 74: mod_base = OTHER; note = Uracil
  modified_base 80: mod_base = OTHER; note = Uracil
ggaggagctacgatgcggcccatcactcccgcgtattgcgaacgcctcgttatttagccgtcagacgactcgctgaggatccgaca

SEQ ID NO: 119 - DNA, 86 bp, synthetic construct
  misc_feature 1..86: note = Synthetic Polynucleotide
  source 1..86: mol_type = other DNA
  modified_base 9: mod_base = OTHER; note = Uracil
  modified_base 14: mod_base = OTHER; note = Uracil
  modified_base 19: mod_base = OTHER; note = Uracil
  modified_base 23..25: mod_base = OTHER; note = Uracil
  modified_base 28: mod_base = OTHER; note = Uracil
  modified_base 31: mod_base = OTHER; note = Uracil
  modified_base 34: mod_base = OTHER; note = Uracil
  modified_base 38: mod_base = OTHER; note = Uracil
  modified_base 43: mod_base = OTHER; note = Uracil
  modified_base 48..49: mod_base = OTHER; note = Uracil
  modified_base 54..55: mod_base = OTHER; note = Uracil
  modified_base 61: mod_base = OTHER; note = Uracil
  modified_base 70: mod_base = OTHER; note = Uracil
  modified_base 74: mod_base = OTHER; note = Uracil
  modified_base 80: mod_base = OTHER; note = Uracil
ggaggagctacgatgcggtcgatttcgtcatcctccgtaccatcgccttaccgttccgcgtcagacgactcgctgaggatccgaca

SEQ ID NO: 120 - DNA, 85 bp, synthetic construct
  misc_feature 1..85: note = Synthetic Polynucleotide
  source 1..85: mol_type = other DNA
  modified_base 9: mod_base = OTHER; note = Uracil
  modified_base 14: mod_base = OTHER; note = Uracil
  modified_base 19: mod_base = OTHER; note = Uracil
  modified_base 23..24: mod_base = OTHER; note = Uracil
  modified_base 26..27: mod_base = OTHER; note = Uracil
  modified_base 35..37: mod_base = OTHER; note = Uracil
  modified_base 39: mod_base = OTHER; note = Uracil
  modified_base 42: mod_base = OTHER; note = Uracil
  modified_base 44..45: mod_base = OTHER; note = Uracil
  modified_base 48: mod_base = OTHER; note = Uracil
  modified_base 54: mod_base = OTHER; note = Uracil
  modified_base 57: mod_base = OTHER; note = Uracil
  modified_base 69: mod_base = OTHER; note = Uracil
  modified_base 73: mod_base = OTHER; note = Uracil
  modified_base 79: mod_base = OTHER; note = Uracil
ggaggagctacgatgcggtgaattcttccggcactttgtcatcttcatccccatgctgcacagacgactcgctgaggatccgaca

SEQ ID NO: 121 - DNA, 86 bp, synthetic construct
  misc_feature 1..86: note = Synthetic Polynucleotide
  source 1..86: mol_type = other DNA
  modified_base 9: mod_base = OTHER; note = Uracil
  modified_base 14: mod_base = OTHER; note = Uracil
  modified_base 23..25: mod_base = OTHER; note = Uracil
  modified_base 28: mod_base = OTHER; note = Uracil
  modified_base 31: mod_base = OTHER; note = Uracil
  modified_base 34: mod_base = OTHER; note = Uracil
  modified_base 38: mod_base = OTHER; note = Uracil
  modified_base 43: mod_base = OTHER; note = Uracil
  modified_base 48..49: mod_base = OTHER; note = Uracil
  modified_base 54..55: mod_base = OTHER; note = Uracil
  modified_base 61: mod_base = OTHER; note = Uracil
  modified_base 70: mod_base = OTHER; note = Uracil
  modified_base 74: mod_base = OTHER; note = Uracil
  modified_base 80: mod_base = OTHER; note = Uracil
ggaggagctacgatgcggccgatttcgtcatcctccataccatcgccttaccgttacgcgtcagacgactcgctgaggatccgaca

SEQ ID NO: 122 - DNA, 86 bp, synthetic construct
  misc_feature 1..86: note = Synthetic Polynucleotide
  source 1..86: mol_type = other DNA
  modified_base 9: mod_base = OTHER; note = Uracil
  modified_base 14: mod_base = OTHER; note = Uracil
  modified_base 23..25: mod_base = OTHER; note = Uracil
  modified_base 28: mod_base = OTHER; note = Uracil
  modified_base 34: mod_base = OTHER; note = Uracil
  modified_base 38: mod_base = OTHER; note = Uracil
  modified_base 43: mod_base = OTHER; note = Uracil
  modified_base 48..49: mod_base = OTHER; note = Uracil
  modified_base 54..55: mod_base = OTHER; note = Uracil
  modified_base 61: mod_base = OTHER; note = Uracil
  modified_base 70: mod_base = OTHER; note = Uracil
  modified_base 74: mod_base = OTHER; note = Uracil
  modified_base 80: mod_base = OTHER; note = Uracil
ggaggagctacgatgcggccgatttcgtcaacctccataccatcgccttaccgttccgcgtcagacgactcgctgaggatccgaca

SEQ ID NO: 123 - DNA, 86 bp, synthetic construct
  misc_feature 1..86: note = Synthetic Polynucleotide
  source 1..86: mol_type = other DNA
  modified_base 9: mod_base = OTHER; note = Uracil
  modified_base 14: mod_base = OTHER; note = Uracil
  modified_base 23..25: mod_base = OTHER; note = Uracil
  modified_base 28: mod_base = OTHER; note = Uracil
  modified_base 31: mod_base = OTHER; note = Uracil
  modified_base 38: mod_base = OTHER; note = Uracil
  modified_base 43: mod_base = OTHER; note = Uracil
  modified_base 48..49: mod_base = OTHER; note = Uracil
  modified_base 54..55: mod_base = OTHER; note = Uracil
  modified_base 61: mod_base = OTHER; note = Uracil
  modified_base 70: mod_base = OTHER; note = Uracil
  modified_base 74: mod_base = OTHER; note = Uracil
  modified_base 80: mod_base = OTHER; note = Uracil
ggaggagctacgatgcggccgatttcgtcatccgccataccatcgccttaccgttccgcgtcagacgactcgctgaggatccgaca

SEQ ID NO: 124 - DNA, 85 bp, synthetic construct
  misc_feature 1..85: note = Synthetic Polynucleotide
  source 1..85: mol_type = other DNA
  modified_base 9: mod_base = OTHER; note = Uracil
  modified_base 14: mod_base = OTHER; note = Uracil
  modified_base 22: mod_base = OTHER; note = Uracil
  modified_base 28: mod_base = OTHER; note = Uracil
  modified_base 30: mod_base = OTHER; note = Uracil
  modified_base 24: mod_base = OTHER; note = Uracil
  modified_base 33: mod_base = OTHER; note = Uracil
  modified_base 38: mod_base = OTHER; note = Uracil
  modified_base 49: mod_base = OTHER; note = Uracil
  modified_base 51: mod_base = OTHER; note = Uracil
  modified_base 69: mod_base = OTHER; note = Uracil
  modified_base 57: mod_base = OTHER; note = Uracil
  modified_base 53: mod_base = OTHER; note = Uracil
  modified_base 73: mod_base = OTHER; note = Uracil
  modified_base 79: mod_base = OTHER; note = Uracil
ggaggagctacgatgcggccgtctcgctctcatcccatgcacgaaacctctctccctgcacagacgactcgctgaggatccgaca

SEQ ID NO: 125 - DNA, 86 bp, synthetic construct
  misc_feature 1..86: note = Synthetic Polynucleotide
  source 1..86: mol_type = other DNA
  modified_base 9: mod_base = OTHER; note = Uracil
  modified_base 14: mod_base = OTHER; note = Uracil
  modified_base 23..25: mod_base = OTHER; note = Uracil
  modified_base 28: mod_base = OTHER; note = Uracil
  modified_base 31: mod_base = OTHER; note = Uracil
  modified_base 34: mod_base = OTHER; note = Uracil
  modified_base 43: mod_base = OTHER; note = Uracil
  modified_base 48..49: mod_base = OTHER; note = Uracil
  modified_base 55: mod_base = OTHER; note = Uracil
  modified_base 61: mod_base = OTHER; note = Uracil
  modified_base 74: mod_base = OTHER; note = Uracil
  modified_base 80: mod_base = OTHER; note = Uracil
  modified_base 70: mod_base = OTHER; note = Uracil
ggaggagctacgatgcggccgatttcgtcatcctccacaccatcgccttaccgctccgcgtcagacgactcgctgaggatccgaca

SEQ ID NO: 126 - DNA, 86 bp, synthetic construct
  misc_feature 1..86: note = Synthetic Polynucleotide
  source 1..86: mol_type = other DNA
  modified_base 9: mod_base = OTHER; note = Uracil
  modified_base 14: mod_base = OTHER; note = Uracil
  modified_base 23..25: mod_base = OTHER; note = Uracil
  modified_base 28: mod_base = OTHER; note = Uracil
  modified_base 31: mod_base = OTHER; note = Uracil
  modified_base 34: mod_base = OTHER; note = Uracil
  modified_base 38: mod_base = OTHER; note = Uracil
  modified_base 43: mod_base = OTHER; note = Uracil
  modified_base 43..49: mod_base = OTHER; note = Uracil
  modified_base 54..55: mod_base = OTHER; note = Uracil
  modified_base 60..61: mod_base = OTHER; note = Uracil
  modified_base 70: mod_base = OTHER; note = Uracil
  modified_base 74: mod_base = OTHER; note = Uracil
  modified_base 80: mod_base = OTHER; note = Uracil
ggaggagctacgatgcggccgatttcgtcatcctccataccatcgccttaccgttccgcttcagacgactcgctgaggatccgaca

SEQ ID NO: 127 - DNA, 86 bp, synthetic construct
  misc_feature 1..86: note = Synthetic Polynucleotide
  source 1..86: mol_type = other DNA
  modified_base 9: mod_base = OTHER; note = Uracil
  modified_base 14: mod_base = OTHER; note = Uracil
  modified_base 23..25: mod_base = OTHER; note = Uracil
  modified_base 28: mod_base = OTHER; note = Uracil
  modified_base 31: mod_base = OTHER; note = Uracil
  modified_base 34: mod_base = OTHER; note = Uracil
  modified_base 38: mod_base = OTHER; note = Uracil
  modified_base 43: mod_base = OTHER; note = Uracil
  modified_base 48..49: mod_base = OTHER; note = Uracil
  modified_base 54..55: mod_base = OTHER; note = Uracil
  modified_base 61: mod_base = OTHER; note = Uracil
  modified_base 70: mod_base = OTHER; note = Uracil
  modified_base 74: mod_base = OTHER; note = Uracil
  modified_base 80: mod_base = OTHER; note = Uracil
ggaggagctacgatgcggccgatttcgtcatcgtccataccatcgccttaccgttccgcgtcagacgactcgctgaggatccgaca

SEQ ID NO: 128 - DNA, 86 bp, synthetic construct
  misc_feature 1..86: note = Synthetic Polynucleotide
  source 1..86: mol_type = other DNA
  modified_base 9: mod_base = OTHER; note = Uracil
  modified_base 14: mod_base = OTHER; note = Uracil
  modified_base 23..25: mod_base = OTHER; note = Uracil
  modified_base 28: mod_base = OTHER; note = Uracil
  modified_base 31: mod_base = OTHER; note = Uracil
  modified_base 34: mod_base = OTHER; note = Uracil
  modified_base 38: mod_base = OTHER; note = Uracil
  modified_base 43: mod_base = OTHER; note = Uracil
  modified_base 49: mod_base = OTHER; note = Uracil
  modified_base 54..55: mod_base = OTHER; note = Uracil
  modified_base 61: mod_base = OTHER; note = Uracil
  modified_base 70: mod_base = OTHER; note = Uracil
  modified_base 74: mod_base = OTHER; note = Uracil
  modified_base 80: mod_base = OTHER; note = Uracil
ggaggagctacgatgcggccgatttcgtcatcctccataccatcgccgtaccgttccgcgtcagacgactcgctgaggatccgaca

SEQ ID NO: 129 - DNA, 86 bp, synthetic construct
  misc_feature 1..86: note = Synthetic Polynucleotide
  source 1..86: mol_type = other DNA
  modified_base 9: mod_base = OTHER; note = Uracil
  modified_base 14: mod_base = OTHER; note = Uracil
  modified_base 23..25: mod_base = OTHER; note = Uracil
  modified_base 28: mod_base = OTHER; note = Uracil
  modified_base 31: mod_base = OTHER; note = Uracil
  modified_base 34: mod_base = OTHER; note = Uracil
  modified_base 38: mod_base = OTHER; note = Uracil
  modified_base 43: mod_base = OTHER; note = Uracil
  modified_base 48..49: mod_base = OTHER; note = Uracil
  modified_base 54..55: mod_base = OTHER; note = Uracil
  modified_base 61: mod_base = OTHER; note = Uracil
  modified_base 70: mod_base = OTHER; note = Uracil
  modified_base 74: mod_base = OTHER; note = Uracil
  modified_base 80: mod_base = OTHER; note = Uracil
ggaggagctacgatgcggccgatttcgtcatcctccataccatcgccttaccgttgcgcgtcagacgactcgctgaggatccgaca

SEQ ID NO: 130 - DNA, 86 bp, synthetic construct
  misc_feature 1..86: note = Synthetic Polynucleotide
  source 1..86: mol_type = other DNA
  modified_base 9: mod_base = OTHER; note = Uracil
  modified_base 14: mod_base = OTHER; note = Uracil
  modified_base 23: mod_base = OTHER; note = Uracil
  modified_base 25: mod_base = OTHER; note = Uracil
  modified_base 31: mod_base = OTHER; note = Uracil
  modified_base 34: mod_base = OTHER; note = Uracil
  modified_base 38: mod_base = OTHER; note = Uracil
  modified_base 43: mod_base = OTHER; note = Uracil
  modified_base 48..49: mod_base = OTHER; note = Uracil
  modified_base 54..55: mod_base = OTHER; note = Uracil
  modified_base 61: mod_base = OTHER; note = Uracil
  modified_base 70: mod_base = OTHER; note = Uracil
  modified_base 74: mod_base = OTHER; note = Uracil
  modified_base 80: mod_base = OTHER; note = Uracil
ggaggagctacgatgcggccgatgtcgtcatcctccataccatcgccttaccgttccgcgtcagacgactcgctgaggatccgaca

SEQ ID NO: 131 - DNA, 85 bp, synthetic construct
  misc_feature 1..85: note = Synthetic Polynucleotide
  source 1..85: mol_type = other DNA
  modified_base 9: mod_base = OTHER; note = Uracil
  modified_base 14: mod_base = OTHER; note = Uracil
  modified_base 23: mod_base = OTHER; note = Uracil
  modified_base 25: mod_base = OTHER; note = Uracil
  modified_base 28: mod_base = OTHER; note = Uracil
  modified_base 31: mod_base = OTHER; note = Uracil
  modified_base 34: mod_base = OTHER; note = Uracil
  modified_base 38: mod_base = OTHER; note = Uracil
  modified_base 43: mod_base = OTHER; note = Uracil
  modified_base 48..49: mod_base = OTHER; note = Uracil
  modified_base 53..54: mod_base = OTHER; note = Uracil
  modified_base 60: mod_base = OTHER; note = Uracil
  modified_base 69: mod_base = OTHER; note = Uracil
  modified_base 73: mod_base = OTHER; note = Uracil
  modified_base 79: mod_base = OTHER; note = Uracil
ggaggagctacgatgcggccgatatcgtcatcctccataccatcgccttccgttccgcgtcagacgactcgctgaggatccgaca

SEQ ID NO: 132 - DNA, 85 bp, synthetic construct
  misc_feature 1..85: note = Synthetic Polynucleotide
  source 1..85: mol_type = other DNA
  modified_base 9: mod_base = OTHER; note = Uracil
  modified_base 14: mod_base = OTHER; note = Uracil
  modified_base 23..25: mod_base = OTHER; note = Uracil
  modified_base 28: mod_base = OTHER; note = Uracil
  modified_base 31: mod_base = OTHER; note = Uracil
  modified_base 34: mod_base = OTHER; note = Uracil
  modified_base 38: mod_base = OTHER; note = Uracil
  modified_base 43: mod_base = OTHER; note = Uracil
  modified_base 48..49: mod_base = OTHER; note = Uracil
  modified_base 54..55: mod_base = OTHER; note = Uracil
  modified_base 60: mod_base = OTHER; note = Uracil
  modified_base 69: mod_base = OTHER; note = Uracil
  modified_base 73: mod_base = OTHER; note = Uracil
  modified_base 79: mod_base = OTHER; note = Uracil
ggaggagctacgatgcggccgatttcgtcatcctccataccatcgccttaccgttcgcgtcagacgactcgctgaggatccgaca

SEQ ID NO: 133 - DNA, 84 bp, synthetic construct
  misc_feature 1..84: note = Synthetic Polynucleotide
  source 1..84: mol_type = other DNA
  modified_base 9: mod_base = OTHER; note = Uracil
  modified_base 14: mod_base = OTHER; note = Uracil
  modified_base 19: mod_base = OTHER; note = Uracil
  modified_base 23..24: mod_base = OTHER; note = Uracil
  modified_base 26..27: mod_base = OTHER; note = Uracil
  modified_base 35..37: mod_base = OTHER; note = Uracil
  modified_base 39: mod_base = OTHER; note = Uracil
  modified_base 42: mod_base = OTHER; note = Uracil
  modified_base 44..45: mod_base = OTHER; note = Uracil
  modified_base 53: mod_base = OTHER; note = Uracil
  modified_base 56: mod_base = OTHER; note = Uracil
  modified_base 68: mod_base = OTHER; note = Uracil
  modified_base 72: mod_base = OTHER; note = Uracil
  modified_base 78: mod_base = OTHER; note = Uracil
ggaggagctacgatgcggtgaattcttccggcactttgtcatcttcaccccatgctgcacagacgactcgctgaggatccgaca

SEQ ID NO: 134 - DNA, 85 bp, synthetic construct
  misc_feature 1..85: note = Synthetic Polynucleotide
  source 1..85: mol_type = other DNA
  modified_base 9: mod_base = OTHER; note = Uracil
  modified_base 14: mod_base = OTHER; note = Uracil
  modified_base 19: mod_base = OTHER; note = Uracil
  modified_base 23..24: mod_base = OTHER; note = Uracil
  modified_base 26..27: mod_base = OTHER; note = Uracil
  modified_base 39: mod_base = OTHER; note = Uracil
  modified_base 35..37: mod_base = OTHER; note = Uracil
  modified_base 42: mod_base = OTHER; note = Uracil
  modified_base 44..45: mod_base = OTHER; note = Uracil
  modified_base 54: mod_base = OTHER; note = Uracil
  modified_base 57: mod_base = OTHER; note = Uracil
  modified_base 69: mod_base = OTHER; note = Uracil
  modified_base 73: mod_base = OTHER; note = Uracil
  modified_base 79: mod_base = OTHER; note = Uracil
ggaggagctacgatgcggtgaattcttccggcactttgtcatcttcgcccccatgctgcacagacgactcgctgaggatccgaca

SEQ ID NO: 135 - DNA, 87 bp, synthetic construct
  misc_feature 1..87: note = Synthetic Polynucleotide
  source 1..87: mol_type = other DNA
  modified_base 9: mod_base = OTHER; note = Uracil
  modified_base 14: mod_base = OTHER; note = Uracil
  modified_base 23: mod_base = OTHER; note = Uracil
  modified_base 30: mod_base = OTHER; note = Uracil
  modified_base 32: mod_base = OTHER; note = Uracil
  modified_base 35: mod_base = OTHER; note = Uracil
  modified_base 39: mod_base = OTHER; note = Uracil
  modified_base 49: mod_base = OTHER; note = Uracil
  modified_base 51: mod_base = OTHER; note = Uracil
  modified_base 54: mod_base = OTHER; note = Uracil
  modified_base 71: mod_base = OTHER; note = Uracil
  modified_base 75: mod_base = OTHER; note = Uracil
  modified_base 81: mod_base = OTHER; note = Uracil
ggaggagctacgatgcggcaggtgcgggatctaatgcgtagacagccatatactgacacagacagacgactcgctgaggatccgaca

SEQ ID NO: 136 - DNA, 85 bp, synthetic construct
  misc_feature 1..85: note = Synthetic Polynucleotide
  source 1..85: mol_type = other DNA
  modified_base 9: mod_base = OTHER; note = Uracil
  modified_base 14: mod_base = OTHER; note = Uracil
  modified_base 22: mod_base = OTHER; note = Uracil
  modified_base 24: mod_base = OTHER; note = Uracil
  modified_base 28: mod_base = OTHER; note = Uracil
  modified_base 30: mod_base = OTHER; note = Uracil
  modified_base 33: mod_base = OTHER; note = Uracil
  modified_base 38: mod_base = OTHER; note = Uracil
  modified_base 49: mod_base = OTHER; note = Uracil
  modified_base 51: mod_base = OTHER; note = Uracil
  modified_base 53: mod_base = OTHER; note = Uracil
  modified_base 57: mod_base = OTHER; note = Uracil
  modified_base 69: mod_base = OTHER; note = Uracil
  modified_base 73: mod_base = OTHER; note = Uracil
  modified_base 79: mod_base = OTHER; note = Uracil
ggaggagctacgatgcggccgtctcgctctcatcccatgcacgaaccctctctcactgcacagacgactcgctgaggatccgaca

SEQ ID NO: 137 - DNA, 86 bp, synthetic construct
  misc_feature 1..86: note = Synthetic Polynucleotide
  source 1..86: mol_type = other DNA
  modified_base 9: mod_base = OTHER; note = Uracil
  modified_base 14: mod_base = OTHER; note = Uracil
  modified_base 23..24: mod_base = OTHER; note = Uracil
  modified_base 28: mod_base = OTHER; note = Uracil
  modified_base 31: mod_base = OTHER; note = Uracil
  modified_base 34: mod_base = OTHER; note = Uracil
  modified_base 38: mod_base = OTHER; note = Uracil
  modified_base 43: mod_base = OTHER; note = Uracil
  modified_base 48..49: mod_base = OTHER; note = Uracil
  modified_base 54..55: mod_base = OTHER; note = Uracil
  modified_base 61: mod_base = OTHER; note = Uracil
  modified_base 70: mod_base = OTHER; note = Uracil
  modified_base 74: mod_base = OTHER; note = Uracil
  modified_base 80: mod_base = OTHER; note = Uracil
ggaggagctacgatgcggccgattgcgtcatcctccataccatcgccttaccgttccgcgtcagacgactcgctgaggatccgaca

SEQ ID NO: 138 - DNA, 85 bp, synthetic construct
  misc_feature 1..85: note = Synthetic Polynucleotide
  source 1..85: mol_type = other DNA
  modified_base 9: mod_base = OTHER; note = Uracil
  modified_base 14: mod_base = OTHER; note = Uracil
  modified_base 19: mod_base = OTHER; note = Uracil
  modified_base 23..24: mod_base = OTHER; note = Uracil
  modified_base 26..27: mod_base = OTHER; note = Uracil
  modified_base 35..37: mod_base = OTHER; note = Uracil
  modified_base 39: mod_base = OTHER; note = Uracil
  modified_base 42: mod_base = OTHER; note = Uracil
  modified_base 44..45: mod_base = OTHER; note = Uracil
  modified_base 54: mod_base = OTHER; note = Uracil
  modified_base 57: mod_base = OTHER; note = Uracil
  modified_base 60: mod_base = OTHER; note = Uracil
  modified_base 69: mod_base = OTHER; note = Uracil
  modified_base 73: mod_base = OTHER; note = Uracil
  modified_base 79: mod_base = OTHER; note = Uracil
ggaggagctacgatgcggtgaattcttccggcactttgtcatcttcacccccatgctgctcagacgactcgctgaggatccgaca

SEQ ID NO: 139 - DNA, 85 bp, synthetic construct
  misc_feature 1..85: note = Synthetic Polynucleotide
  source 1..85: mol_type = other DNA
  modified_base 9: mod_base = OTHER; note = Uracil
  modified_base 14: mod_base = OTHER; note = Uracil
  modified_base 22: mod_base = OTHER; note = Uracil
  modified_base 24: mod_base = OTHER; note = Uracil
  modified_base 28: mod_base = OTHER; note = Uracil
  modified_base 30: mod_base = OTHER; note = Uracil
  modified_base 33: mod_base = OTHER; note = Uracil
  modified_base 38: mod_base = OTHER; note = Uracil
  modified_base 49: mod_base = OTHER; note = Uracil
  modified_base 51: mod_base = OTHER; note = Uracil
  modified_base 53: mod_base = OTHER; note = Uracil
  modified_base 57: mod_base = OTHER; note = Uracil
  modified_base 69: mod_base = OTHER; note = Uracil
  modified_base 73: mod_base = OTHER; note = Uracil
  modified_base 79: mod_base = OTHER; note = Uracil
ggaggagctacgatgcggccgtctcgctctcatcccatgcacgaaacctctctcactgcgcagacgactcgctgaggatccgaca

SEQ ID NO: 140 - DNA, 85 bp, synthetic construct
  misc_feature 1..85: note = Synthetic Polynucleotide
  source 1..85: mol_type = other DNA
  modified_base 9: mod_base = OTHER; note = Uracil
  modified_base 14: mod_base = OTHER; note = Uracil
  modified_base 28: mod_base = OTHER; note = Uracil
  modified_base 31..32: mod_base = OTHER; note = Uracil
  modified_base 35: mod_base = OTHER; note = Uracil
  modified_base 38: mod_base = OTHER; note = Uracil
  modified_base 46: mod_base = OTHER; note = Uracil
  modified_base 55..56: mod_base = OTHER; note = Uracil
  modified_base 69: mod_base = OTHER; note = Uracil
  modified_base 73: mod_base = OTHER; note = Uracil
  modified_base 79: mod_base = OTHER; note = Uracil
ggaggagctacgatgcggacggaaggatagttgctaatcgagccctgccgacgcttcagacagacgactcgctgaggatccgaca

SEQ ID NO: 141 - DNA, 88 bp, synthetic construct
  misc_feature 1..88: note = Synthetic Polynucleotide
  source 1..88: mol_type = other DNA
  modified_base 9: mod_base = OTHER; note = Uracil
  modified_base 14: mod_base = OTHER; note = Uracil
  modified_base 26: mod_base = OTHER; note = Uracil
  modified_base 29: mod_base = OTHER; note = Uracil
  modified_base 39: mod_base = OTHER; note = Uracil
  modified_base 46..48: mod_base = OTHER; note = Uracil
  modified_base 54: mod_base = OTHER; note = Uracil
  modified_base 72: mod_base = OTHER; note = Uracil
  modified_base 76: mod_base = OTHER; note = Uracil
  modified_base 82: mod_base = OTHER; note = Uracil
ggaggagctacgatgcggcaaaaactgataaacacaggtccggcatttgagcgtacacccagacagacgactcgctgaggatccgaca

SEQ ID NO: 142 - DNA, 85 bp, synthetic construct
  misc_feature 1..85: note = Synthetic Polynucleotide
  source 1..85: mol_type = other DNA
  modified_base 9: mod_base = OTHER; note = Uracil
  modified_base 14: mod_base = OTHER; note = Uracil
  modified_base 19: mod_base = OTHER; note = Uracil
  modified_base 23..24: mod_base = OTHER; note = Uracil
  modified_base 26..27: mod_base = OTHER; note = Uracil
  modified_base 35..37: mod_base = OTHER; note = Uracil
  modified_base 39: mod_base = OTHER; note = Uracil
  modified_base 42: mod_base = OTHER; note = Uracil
  modified_base 44..45: mod_base = OTHER; note = Uracil
  modified_base 54: mod_base = OTHER; note = Uracil
  modified_base 57: mod_base = OTHER; note = Uracil
  modified_base 69: mod_base = OTHER; note = Uracil
  modified_base 73: mod_base = OTHER; note = Uracil
  modified_base 79: mod_base = OTHER; note = Uracil
ggaggagctacgatgcggtgaattcttccggcactttgtcatcttcacccccgtgctgcacagacgactcgctgaggatccgaca

SEQ ID NO: 143 - DNA, 85 bp, synthetic construct
  misc_feature 1..85: note = Synthetic Polynucleotide
  source 1..85: mol_type = other DNA
  modified_base 9: mod_base = OTHER; note = Uracil
  modified_base 14: mod_base = OTHER; note = Uracil
  modified_base 23..25: mod_base = OTHER; note = Uracil
  modified_base 28: mod_base = OTHER; note = Uracil
  modified_base 31: mod_base = OTHER; note = Uracil
  modified_base 34: mod_base = OTHER; note = Uracil
  modified_base 38: mod_base = OTHER; note = Uracil
  modified_base 42: mod_base = OTHER; note = Uracil
  modified_base 47..48: mod_base = OTHER; note = Uracil
  modified_base 53..54: mod_base = OTHER; note = Uracil
  modified_base 60: mod_base = OTHER; note = Uracil
  modified_base 73: mod_base = OTHER; note = Uracil
  modified_base 69: mod_base = OTHER; note = Uracil
  modified_base 79: mod_base = OTHER; note = Uracil
ggaggagctacgatgcggccgatttcgtcatcctccatacctcgccttaccgttccgcgtcagacgactcgctgaggatccgaca

SEQ ID NO: 144 - DNA, 86 bp, synthetic construct
  misc_feature 1..86: note = Synthetic Polynucleotide
  source 1..86: mol_type = other DNA
  modified_base 9: mod_base = OTHER; note = Uracil
  modified_base 14: mod_base = OTHER; note = Uracil
  modified_base 23..25: mod_base = OTHER; note = Uracil
  modified_base 28: mod_base = OTHER; note = Uracil
  modified_base 31: mod_base = OTHER; note = Uracil
  modified_base 34: mod_base = OTHER; note = Uracil
  modified_base 38: mod_base = OTHER; note = Uracil
  modified_base 43: mod_base = OTHER; note = Uracil
  modified_base 48..49: mod_base = OTHER; note = Uracil
  modified_base 54..55: mod_base = OTHER; note = Uracil
  modified_base 61: mod_base = OTHER; note = Uracil
  modified_base 70: mod_base = OTHER; note = Uracil
  modified_base 74: mod_base = OTHER; note = Uracil
  modified_base 80: mod_base = OTHER; note = Uracil
ggaggagctacgatgcggccgatttcgtcatcctccataccatcgccttaccgttccgcctcagacgactcgctgaggatccgaca

SEQ ID NO: 145 - DNA, 86 bp, synthetic construct
  misc_feature 1..86: note = Synthetic Polynucleotide
  source 1..86: mol_type = other DNA
  modified_base 9: mod_base = OTHER; note = Uracil
  modified_base 14: mod_base = OTHER; note = Uracil
  modified_base 23: mod_base = OTHER; note = Uracil
  modified_base 27: mod_base = OTHER; note = Uracil
  modified_base 34: mod_base = OTHER; note = Uracil
  modified_base 36..37: mod_base = OTHER; note = Uracil
  modified_base 47: mod_base = OTHER; note = Uracil
  modified_base 50..51: mod_base = OTHER; note = Uracil
  modified_base 53..55: mod_base = OTHER; note = Uracil
  modified_base 61: mod_base = OTHER; note = Uracil
  modified_base 70: mod_base = OTHER; note = Uracil
  modified_base 74: mod_base = OTHER; note = Uracil
  modified_base 80: mod_base = OTHER; note = Uracil
ggaggagctacgatgcggcccatcactcccgcgtgttgcgaacgcatcgttatttagccgtcagacgactcgctgaggatccgaca

SEQ ID NO: 146 - DNA, 87 bp, synthetic construct
  misc_feature 1..87: note = Synthetic Polynucleotide
  source 1..87: mol_type = other DNA
  modified_base 9: mod_base = OTHER; note = Uracil
  modified_base 14: mod_base = OTHER; note = Uracil
  modified_base 20..21: mod_base = OTHER; note = Uracil
  modified_base 25: mod_base = OTHER; note = Uracil
  modified_base 27..28: mod_base = OTHER; note = Uracil
  modified_base 39: mod_base = OTHER; note = Uracil
  modified_base 44: mod_base = OTHER; note = Uracil
  modified_base 48..49: mod_base = OTHER; note = Uracil
  modified_base 53..54: mod_base = OTHER; note = Uracil
  modified_base 50..51: mod_base = OTHER; note = Uracil
  modified_base 71: mod_base = OTHER; note = Uracil
  modified_base 75: mod_base = OTHER; note = Uracil
  modified_base 81: mod_base = OTHER; note = Uracil
ggaggagctacgatgcggcttccctattccaaaggaggtgcggtacgttttgttacgccagacagacgactcgctgaggatccgaca

SEQ ID NO: 147 - DNA, 86 bp, synthetic construct
  misc_feature 1..86: note = Synthetic Polynucleotide
  source 1..86: mol_type = other DNA
  modified_base 9: mod_base = OTHER; note = Uracil
  modified_base 14: mod_base = OTHER; note = Uracil
  modified_base 23..25: mod_base = OTHER; note = Uracil
  modified_base 28: mod_base = OTHER; note = Uracil
  modified_base 31: mod_base = OTHER; note = Uracil
  modified_base 34: mod_base = OTHER; note = Uracil
  modified_base 38: mod_base = OTHER; note = Uracil
  modified_base 41: mod_base = OTHER; note = Uracil
  modified_base 43: mod_base = OTHER; note = Uracil
  modified_base 49: mod_base = OTHER; note = Uracil
  modified_base 54..55: mod_base = OTHER; note = Uracil
  modified_base 61: mod_base = OTHER; note = Uracil
  modified_base 70: mod_base = OTHER; note = Uracil
  modified_base 74: mod_base = OTHER; note = Uracil
  modified_base 80: mod_base = OTHER; note = Uracil
ggaggagctacgatgcggccgatttcgtcatcctccatactatcgccctaccgttccgcgtcagacgactcgctgaggatccgaca

SEQ ID NO: 148 - DNA, 86 bp, synthetic construct
  misc_feature 1..86: note = Synthetic Polynucleotide
  source 1..86: mol_type = other DNA
  modified_base 9: mod_base = OTHER; note = Uracil
  modified_base 14: mod_base = OTHER; note = Uracil
  modified_base 23..25: mod_base = OTHER; note = Uracil
  modified_base 28: mod_base = OTHER; note = Uracil
  modified_base 31: mod_base = OTHER; note = Uracil
  modified_base 34: mod_base = OTHER; note = Uracil
  modified_base 43: mod_base = OTHER; note = Uracil
  modified_base 48..49: mod_base = OTHER; note = Uracil
  modified_base 54..55: mod_base = OTHER; note = Uracil
  modified_base 61: mod_base = OTHER; note = Uracil
  modified_base 70: mod_base = OTHER; note = Uracil
  modified_base 74: mod_base = OTHER; note = Uracil
  modified_base 80: mod_base = OTHER; note = Uracil
ggaggagctacgatgcggccgatttcgtcatcctccacaccatcgccttaccgttccgcatcagacgactcgctgaggatccgaca

SEQ ID NO: 149 - DNA, 86 bp, synthetic construct
  misc_feature 1..86: note = Synthetic Polynucleotide
  source 1..86: mol_type = other DNA
  modified_base 9: mod_base = OTHER; note = Uracil
  modified_base 14: mod_base = OTHER; note = Uracil
  modified_base 23..25: mod_base = OTHER; note = Uracil
  modified_base 28: mod_base = OTHER; note = Uracil
  modified_base 31: mod_base = OTHER; note = Uracil
  modified_base 34: mod_base = OTHER; note = Uracil
  modified_base 38: mod_base = OTHER; note = Uracil
  modified_base 43: mod_base = OTHER; note = Uracil
  modified_base 48..49: mod_base = OTHER; note = Uracil
  modified_base 54: mod_base = OTHER; note = Uracil
  modified_base 61: mod_base = OTHER; note = Uracil
  modified_base 70: mod_base = OTHER; note = Uracil
  modified_base 74: mod_base = OTHER; note = Uracil
  modified_base 80: mod_base = OTHER; note = Uracil
ggaggagctacgatgcggccgatttcgtcatcctccataccatcgccttaccgtgccgcgtcagacgactcgctgaggatccgaca

SEQ ID NO: 150 - DNA, 85 bp, synthetic construct
  misc_feature 1..85: note = Synthetic Polynucleotide
  source 1..85: mol_type = other DNA
  modified_base 9: mod_base = OTHER; note = Uracil
  modified_base 14: mod_base = OTHER; note = Uracil
  modified_base 19: mod_base = OTHER; note = Uracil
  modified_base 23..24: mod_base = OTHER; note = Uracil
  modified_base 26..27: mod_base = OTHER; note = Uracil
  modified_base 36..37: mod_base = OTHER; note = Uracil
  modified_base 39: mod_base = OTHER; note = Uracil
  modified_base 42: mod_base = OTHER; note = Uracil
  modified_base 44..45: mod_base = OTHER; note = Uracil
  modified_base 54: mod_base = OTHER; note = Uracil
  modified_base 57: mod_base = OTHER; note = Uracil
  modified_base 69: mod_base = OTHER; note = Uracil
  modified_base 73: mod_base = OTHER; note = Uracil
  modified_base 79: mod_base = OTHER; note = Uracil
ggaggagctacgatgcggtgaattcttccggcaccttgtcatcttcacccccatgctgcacagacgactcgctgaggatccgaca

SEQ ID NO: 151 - DNA, 87 bp, synthetic construct
  misc_feature 1..87: note = Synthetic Polynucleotide
  source 1..87: mol_type = other DNA
  modified_base 9: mod_base = OTHER; note = Uracil
  modified_base 14: mod_base = OTHER; note = Uracil
  modified_base 19: mod_base = OTHER; note = Uracil
  modified_base 21: mod_base = OTHER; note = Uracil
  modified_base 26: mod_base = OTHER; note = Uracil
  modified_base 29..30: mod_base = OTHER; note = Uracil
  modified_base 34..36: mod_base = OTHER; note = Uracil
  modified_base 38: mod_base = OTHER; note = Uracil
  modified_base 40..41: mod_base = OTHER; note = Uracil
  modified_base 43: mod_base = OTHER; note = Uracil
  modified_base 54: mod_base = OTHER; note = Uracil
  modified_base 56: mod_base = OTHER; note = Uracil
  modified_base 71: mod_base = OTHER; note = Uracil
  modified_base 75: mod_base = OTHER; note = Uracil
  modified_base 81: mod_base = OTHER; note = Uracil
ggaggagctacgatgcggtgtaccctgattgcctttgtgttatgagcgacagatctgccagacagacgactcgctgaggatccgaca

SEQ ID NO: 152 - DNA, 86 bp, synthetic construct
  misc_feature 1..86: note = Synthetic Polynucleotide
  source 1..86: mol_type = other DNA
  modified_base 9: mod_base = OTHER; note = Uracil
  modified_base 14: mod_base = OTHER; note = Uracil
  modified_base 27: mod_base = OTHER; note = Uracil
  modified_base 34: mod_base = OTHER; note = Uracil
  modified_base 36..37: mod_base = OTHER; note = Uracil
  modified_base 47: mod_base = OTHER; note = Uracil
  modified_base 50..51: mod_base = OTHER; note = Uracil
  modified_base 53..55: mod_base = OTHER; note = Uracil
  modified_base 61: mod_base = OTHER; note = Uracil
  modified_base 70: mod_base = OTHER; note = Uracil
  modified_base 74: mod_base = OTHER; note = Uracil
  modified_base 80: mod_base = OTHER; note = Uracil
ggaggagctacgatgcggcccaccactcccgcgtattgcgaacgcatcgttatttagccgtcagacgactcgctgaggatccgaca

SEQ ID NO: 153 - DNA, 85 bp, synthetic construct
  misc_feature 1..85: note = Synthetic Polynucleotide
  source 1..85: mol_type = other DNA
  modified_base 9: mod_base = OTHER; note = Uracil
  modified_base 14: mod_base = OTHER; note = Uracil
  modified_base 19: mod_base = OTHER; note = Uracil
  modified_base 23..24: mod_base = OTHER; note = Uracil
  modified_base 26..27: mod_base = OTHER; note = Uracil
  modified_base 35..37: mod_base = OTHER; note = Uracil
  modified_base 39: mod_base = OTHER; note = Uracil
  modified_base 42: mod_base = OTHER; note = Uracil
  modified_base 44..45: mod_base = OTHER; note = Uracil
  modified_base 54: mod_base = OTHER; note = Uracil
  modified_base 57: mod_base = OTHER; note = Uracil
  modified_base 69: mod_base = OTHER; note = Uracil
  modified_base 73: mod_base = OTHER; note = Uracil
  modified_base 79: mod_base = OTHER; note = Uracil
ggaggagctacgatgcggtgaattcttccggcactttgtcgtcttcacccccatgctgcacagacgactcgctgaggatccgaca

SEQ ID NO: 154 - DNA, 87 bp, synthetic construct
  misc_feature 1..87: note = Synthetic Polynucleotide
  source 1..87: mol_type = other DNA
  modified_base 9: mod_base = OTHER; note = Uracil
  modified_base 14: mod_base = OTHER; note = Uracil
  modified_base 19: mod_base = OTHER; note = Uracil
  modified_base 24: mod_base = OTHER; note = Uracil
  modified_base 28: mod_base = OTHER; note = Uracil
  modified_base 33: mod_base = OTHER; note = Uracil
  modified_base 44: mod_base = OTHER; note = Uracil
  modified_base 50..52: mod_base = OTHER; note = Uracil
  modified_base 54: mod_base = OTHER; note = Uracil
  modified_base 71: mod_base = OTHER; note = Uracil
  modified_base 75: mod_base = OTHER; note = Uracil
  modified_base 81: mod_base = OTHER; note = Uracil
ggaggagctacgatgcggtacactcagtcacgtagcaccgcagtgaccctttgtaccgcagacagacgactcgctgaggatccgaca

SEQ ID NO: 155 - DNA, 86 bp, synthetic construct
  misc_feature 1..86: note = Synthetic Polynucleotide
  source 1..86: mol_type = other DNA
  modified_base 9: mod_base = OTHER; note = Uracil
  modified_base 14: mod_base = OTHER; note = Uracil
  modified_base 29..31: mod_base = OTHER; note = Uracil
  modified_base 39..40: mod_base = OTHER; note = Uracil
  modified_base 57: mod_base = OTHER; note = Uracil
  modified_base 70: mod_base = OTHER; note = Uracil
  modified_base 74: mod_base = OTHER; note = Uracil
  modified_base 80: mod_base = OTHER; note = Uracil
ggaggagctacgatgcggccagccacactttgaccgaattggcaagcgcgggcaaatcgaacagacgactcgctgaggatccgaca

SEQ ID NO: 156 - DNA, 85 bp, synthetic construct
  misc_feature 1..85: note = Synthetic Polynucleotide
  source 1..85: mol_type = other DNA
  modified_base 9: mod_base = OTHER; note = Uracil
  modified_base 14: mod_base = OTHER; note = Uracil
  modified_base 22: mod_base = OTHER; note = Uracil
  modified_base 24: mod_base = OTHER; note = Uracil
  modified_base 28: mod_base = OTHER; note = Uracil
  modified_base 30: mod_base = OTHER; note = Uracil
  modified_base 33: mod_base = OTHER; note = Uracil
  modified_base 38: mod_base = OTHER; note = Uracil
  modified_base 49: mod_base = OTHER; note = Uracil
  modified_base 51: mod_base = OTHER; note = Uracil
  modified_base 53: mod_base = OTHER; note = Uracil
  modified_base 57: mod_base = OTHER; note = Uracil
  modified_base 69: mod_base = OTHER; note = Uracil
  modified_base 73: mod_base = OTHER; note = Uracil
  modified_base 79: mod_base = OTHER; note = Uracil
ggaggagctacgatgcggccgtctcgctctcatcccatgcacgacacctctctcactgcacagacgactcgctgaggatccgaca

SEQ ID NO: 157 - DNA, 85 bp, synthetic construct
  misc_feature 1..85: note = Synthetic Polynucleotide
  source 1..85: mol_type = other DNA
  modified_base 9: mod_base = OTHER; note = Uracil
  modified_base 14: mod_base = OTHER; note = Uracil
  modified_base 19: mod_base = OTHER; note = Uracil
  modified_base 22: mod_base = OTHER; note = Uracil
  modified_base 24: mod_base = OTHER; note = Uracil
  modified_base 28: mod_base = OTHER; note = Uracil
  modified_base 30: mod_base = OTHER; note = Uracil
  modified_base 33: mod_base = OTHER; note = Uracil
  modified_base 38: mod_base = OTHER; note = Uracil
  modified_base 49: mod_base = OTHER; note = Uracil
  modified_base 51: mod_base = OTHER; note = Uracil
  modified_base 53: mod_base = OTHER; note = Uracil
  modified_base 57: mod_base = OTHER; note = Uracil
  modified_base 69: mod_base = OTHER; note = Uracil
  modified_base 73: mod_base = OTHER; note = Uracil
  modified_base 79: mod_base = OTHER; note = Uracil
ggaggagctacgatgcggtcgtctcgctctcatcccatgcacgaaacctctctcactgcacagacgactcgctgaggatccgaca

SEQ ID NO: 158 - DNA, 85 bp, synthetic construct
  misc_feature 1..85: note = Synthetic Polynucleotide
  source 1..85: mol_type = other DNA
  modified_base 9: mod_base = OTHER; note = Uracil
  modified_base 14: mod_base = OTHER; note = Uracil
  modified_base 23..25: mod_base = OTHER; note = Uracil
  modified_base 28: mod_base = OTHER; note = Uracil
  modified_base 31: mod_base = OTHER; note = Uracil
  modified_base 34: mod_base = OTHER; note = Uracil
  modified_base 38: mod_base = OTHER; note = Uracil
  modified_base 43: mod_base = OTHER; note = Uracil
  modified_base 47..48: mod_base = OTHER; note = Uracil
  modified_base 53..54: mod_base = OTHER; note = Uracil
  modified_base 60: mod_base = OTHER; note = Uracil
  modified_base 69: mod_base = OTHER; note = Uracil
  modified_base 73: mod_base = OTHER; note = Uracil
  modified_base 79: mod_base = OTHER; note = Uracil
ggaggagctacgatgcggccgatttcgtcatcctccataccatgccttaccgttccgcgtcagacgactcgctgaggatccgaca

SEQ ID NO: 159 - DNA, 85 bp, synthetic construct
  misc_feature 1..85: note = Synthetic Polynucleotide
  source 1..85: mol_type = other DNA
  modified_base 9: mod_base = OTHER; note = Uracil
  modified_base 14: mod_base = OTHER; note = Uracil
  modified_base 22: mod_base = OTHER; note = Uracil
  modified_base 24: mod_base = OTHER; note = Uracil
  modified_base 28: mod_base = OTHER; note = Uracil
  modified_base 30: mod_base = OTHER; note = Uracil
  modified_base 33: mod_base = OTHER; note = Uracil
  modified_base 38: mod_base = OTHER; note = Uracil
  modified_base 49: mod_base = OTHER; note = Uracil
  modified_base 51: mod_base = OTHER; note = Uracil
  modified_base 53: mod_base = OTHER; note = Uracil
  modified_base 57: mod_base = OTHER; note = Uracil
  modified_base 69: mod_base = OTHER; note = Uracil
  modified_base 73: mod_base = OTHER; note = Uracil
  modified_base 79: mod_base = OTHER; note = Uracil
ggaggagctacgatgcggccgtctcgctctcctcccatgcacgaaacctctctcactgcacagacgactcgctgaggatccgaca

SEQ ID NO: 160 - DNA, 87 bp, synthetic construct
  misc_feature 1..87: note = Synthetic Polynucleotide
  source 1..87: mol_type = other DNA
  modified_base 9: mod_base = OTHER; note = Uracil
  modified_base 14: mod_base = OTHER; note = Uracil
  modified_base 21: mod_base = OTHER; note = Uracil
  modified_base 23: mod_base = OTHER; note = Uracil
  modified_base 32: mod_base = OTHER; note = Uracil
  modified_base 35: mod_base = OTHER; note = Uracil
  modified_base 37: mod_base = OTHER; note = Uracil
  modified_base 40: mod_base = OTHER; note = Uracil
  modified_base 46..47: mod_base = OTHER; note = Uracil
  modified_base 49: mod_base = OTHER; note = Uracil
  modified_base 53: mod_base = OTHER; note = Uracil
  modified_base 55: mod_base = OTHER; note = Uracil
  modified_base 57: mod_base = OTHER; note = Uracil
  modified_base 71: mod_base = OTHER; note = Uracil
  modified_base 75: mod_base = OTHER; note = Uracil
  modified_base 81: mod_base = OTHER; note = Uracil
ggaggagctacgatgcgggctgtgccggccctgctctggtcgccattgtcagtctgtgcagacagacgactcgctgaggatccgaca

SEQ ID NO: 161 - DNA, 85 bp, synthetic construct
  misc_feature 1..85: note = Synthetic Polynucleotide
  source 1..85: mol_type = other DNA
  modified_base 9: mod_base = OTHER; note = Uracil
  modified_base 14: mod_base = OTHER; note = Uracil
  modified_base 19: mod_base = OTHER; note = Uracil
  modified_base 23..24: mod_base = OTHER; note = Uracil
  modified_base 26: mod_base = OTHER; note = Uracil
  modified_base 35..37: mod_base = OTHER; note = Uracil
  modified_base 39: mod_base = OTHER; note = Uracil
  modified_base 42: mod_base = OTHER; note = Uracil
  modified_base 44..45: mod_base = OTHER; note = Uracil
  modified_base 54: mod_base = OTHER; note = Uracil
  modified_base 57: mod_base = OTHER; note = Uracil
  modified_base 69: mod_base = OTHER; note = Uracil
  modified_base 73: mod_base = OTHER; note = Uracil
  modified_base 79: mod_base = OTHER; note = Uracil
ggaggagctacgatgcggtgaattctcccggcactttgtcatcttcacccccatgctgcacagacgactcgctgaggatccgaca

SEQ ID NO: 162 - DNA, 87 bp, synthetic construct
  misc_feature 1..87: note = Synthetic Polynucleotide
  source 1..87: mol_type = other DNA
  modified_base 9: mod_base = OTHER; note = Uracil
  modified_base 14: mod_base = OTHER; note = Uracil
  modified_base 22..23: mod_base = OTHER; note = Uracil
  modified_base 25..29: mod_base = OTHER; note = Uracil
  modified_base 32: mod_base = OTHER; note = Uracil
  modified_base 34: mod_base = OTHER; note = Uracil
  modified_base 36: mod_base = OTHER; note = Uracil
  modified_base 44..45: mod_base = OTHER; note = Uracil
  modified_base 51..53: mod_base = OTHER; note = Uracil
  modified_base 55: mod_base = OTHER; note = Uracil
  modified_base 59: mod_base = OTHER; note = Uracil
  modified_base 62: mod_base = OTHER; note = Uracil
  modified_base 71: mod_base = OTHER; note = Uracil
  modified_base 75: mod_base = OTHER; note = Uracil
  modified_base 81: mod_base = OTHER; note = Uracil
ggaggagctacgatgcggaccttgtttttcctctgtaccccacttccccatttctccctgctcagacgactcgctgaggatccgaca

SEQ ID NO: 163 - DNA, 87 bp, synthetic construct
  misc_feature 1..87: note = Synthetic Polynucleotide
  source 1..87: mol_type = other DNA
  modified_base 9: mod_base = OTHER; note = Uracil
  modified_base 14: mod_base = OTHER; note = Uracil
  modified_base 20..21: mod_base = OTHER; note = Uracil
  modified_base 23..24: mod_base = OTHER; note = Uracil
  modified_base 26..28: mod_base = OTHER; note = Uracil
  modified_base 33: mod_base = OTHER; note = Uracil
  modified_base 35..36: mod_base = OTHER; note = Uracil
  modified_base 42: mod_base = OTHER; note = Uracil
  modified_base 47..48: mod_base = OTHER; note = Uracil
  modified_base 71: mod_base = OTHER; note = Uracil
  modified_base 75: mod_base = OTHER; note = Uracil
  modified_base 81: mod_base = OTHER; note = Uracil
ggaggagctacgatgcggattattgtttgacgtattccaagtgagattacgcacgcaccagacagacgactcgctgaggatccgaca

SEQ ID NO: 164 - DNA, 86 bp, synthetic construct
  misc_feature 1..86: note = Synthetic Polynucleotide
  source 1..86: mol_type = other DNA
  modified_base 9: mod_base = OTHER; note = Uracil
  modified_base 14: mod_base = OTHER; note = Uracil
  modified_base 23: mod_base = OTHER; note = Uracil
  modified_base 25: mod_base = OTHER; note = Uracil
  modified_base 28: mod_base = OTHER; note = Uracil
  modified_base 31: mod_base = OTHER; note = Uracil
  modified_base 34: mod_base = OTHER; note = Uracil
  modified_base 38: mod_base = OTHER; note = Uracil
  modified_base 43: mod_base = OTHER; note = Uracil
  modified_base 48..49: mod_base = OTHER; note = Uracil
  modified_base 54: mod_base = OTHER; note = Uracil
  modified_base 61: mod_base = OTHER; note = Uracil
  modified_base 70: mod_base = OTHER; note = Uracil
  modified_base 74: mod_base = OTHER; note = Uracil
  modified_base 80: mod_base = OTHER; note = Uracil
ggaggagctacgatgcggccgatatcgtcatcctccataccatcgccttaccgtcccgcgtcagacgactcgctgaggatccgaca

SEQ ID NO: 165 - DNA, 84 bp, synthetic construct
  misc_feature 1..84: note = Synthetic Polynucleotide
  source 1..84: mol_type = other DNA
  modified_base 9: mod_base = OTHER; note = Uracil
  modified_base 14: mod_base = OTHER; note = Uracil
  modified_base 19: mod_base = OTHER; note = Uracil
  modified_base 23..24: mod_base = OTHER; note = Uracil
  modified_base 26..27: mod_base = OTHER; note = Uracil
  modified_base 35..37: mod_base = OTHER; note = Uracil
  modified_base 39: mod_base = OTHER; note = Uracil
  modified_base 42: mod_base = OTHER; note = Uracil
  modified_base 44..45: mod_base = OTHER; note = Uracil
  modified_base 53: mod_base = OTHER; note = Uracil
  modified_base 56: mod_base = OTHER; note = Uracil
  modified_base 68: mod_base = OTHER; note = Uracil
  modified_base 72: mod_base = OTHER; note = Uracil
  modified_base 78: mod_base = OTHER; note = Uracil
ggaggagctacgatgcggtgaattcttccggcactttgtcatcttccccccatgctgcacagacgactcgctgaggatccgaca

SEQ ID NO: 166 - DNA, 85 bp, synthetic construct
  misc_feature 1..85: note = Synthetic Polynucleotide
  source 1..85: mol_type = other DNA
  modified_base 9: mod_base = OTHER; note = Uracil
  modified_base 14: mod_base = OTHER; note = Uracil
  modified_base 22: mod_base = OTHER; note = Uracil
  modified_base 24: mod_base = OTHER; note = Uracil
  modified_base 28: mod_base = OTHER; note = Uracil
  modified_base 30..31: mod_base = OTHER; note = Uracil
  modified_base 38: mod_base = OTHER; note = Uracil
  modified_base 49: mod_base = OTHER; note = Uracil
  modified_base 51: mod_base = OTHER; note = Uracil
  modified_base 53: mod_base = OTHER; note = Uracil
  modified_base 57: mod_base = OTHER; note = Uracil
  modified_base 69: mod_base = OTHER; note = Uracil
  modified_base 73: mod_base = OTHER; note = Uracil
  modified_base 79: mod_base = OTHER; note = Uracil
ggaggagctacgatgcggccgtctcgctcttatcccatgcacgaaacctctctcactgcacagacgactcgctgaggatccgaca

SEQ ID NO: 167 - DNA, 85 bp, synthetic construct
  misc_feature 1..85: note = Synthetic Polynucleotide
  source 1..85: mol_type = other DNA
  modified_base 9: mod_base = OTHER; note = Uracil
  modified_base 14: mod_base = OTHER; note = Uracil
  modified_base 19: mod_base = OTHER; note = Uracil
  modified_base 23..24: mod_base = OTHER; note = Uracil
  modified_base 26..27: mod_base = OTHER; note = Uracil
  modified_base 35..37: mod_base = OTHER; note = Uracil
  modified_base 39: mod_base = OTHER; note = Uracil
  modified_base 42: mod_base = OTHER; note = Uracil
  modified_base 44..45: mod_base = OTHER; note = Uracil
  modified_base 51: mod_base = OTHER; note = Uracil
  modified_base 54: mod_base = OTHER; note = Uracil
  modified_base 57: mod_base = OTHER; note = Uracil
  modified_base 69: mod_base = OTHER; note = Uracil
  modified_base 73: mod_base = OTHER; note = Uracil
  modified_base 79: mod_base = OTHER; note = Uracil
ggaggagctacgatgcggtgaattcttccggcactttgtcatcttcaccctcatgctgcacagacgactcgctgaggatccgaca

SEQ ID NO: 168 - DNA, 86 bp, synthetic construct
  misc_feature 1..86: note = Synthetic Polynucleotide
  source 1..86: mol_type = other DNA
  modified_base 9: mod_base = OTHER; note = Uracil
  modified_base 14: mod_base = OTHER; note = Uracil
  modified_base 23: mod_base = OTHER; note = Uracil
  modified_base 27: mod_base = OTHER; note = Uracil
  modified_base 34: mod_base = OTHER; note = Uracil
  modified_base 36..37: mod_base = OTHER; note = Uracil
  modified_base 47: mod_base = OTHER; note = Uracil
  modified_base 50..51: mod_base = OTHER; note = Uracil
  modified_base 53..55: mod_base = OTHER; note = Uracil
  modified_base 61: mod_base = OTHER; note = Uracil
  modified_base 70: mod_base = OTHER; note = Uracil
  modified_base 74: mod_base = OTHER; note = Uracil
  modified_base 80: mod_base = OTHER; note = Uracil
ggaggagctacgatgcggcccatcactcccgcgtattgcgaacgcatcgttgtttagccgtcagacgactcgctgaggatccgaca

SEQ ID NO: 169 - DNA, 85 bp, synthetic construct
  misc_feature 1..85: note = Synthetic Polynucleotide
  source 1..85: mol_type = other DNA
  modified_base 9: mod_base = OTHER; note = Uracil
  modified_base 14: mod_base = OTHER; note = Uracil
  modified_base 19: mod_base = OTHER; note = Uracil
  modified_base 23..24: mod_base = OTHER; note = Uracil
  modified_base 26..27: mod_base = OTHER; note = Uracil
  modified_base 35..37: mod_base = OTHER; note = Uracil
  modified_base 39: mod_base = OTHER; note = Uracil
  modified_base 42: mod_base = OTHER; note = Uracil
  modified_base 45: mod_base = OTHER; note = Uracil
  modified_base 54: mod_base = OTHER; note = Uracil
  modified_base 57: mod_base = OTHER; note = Uracil
  modified_base 69: mod_base = OTHER; note = Uracil
  modified_base 73: mod_base = OTHER; note = Uracil
  modified_base 79: mod_base = OTHER; note = Uracil
ggaggagctacgatgcggtgaattcttccggcactttgtcatcctcacccccatgctgcacagacgactcgctgaggatccgaca

SEQ ID NO: 170 - DNA, 86 bp, synthetic construct
  misc_feature 1..86: note = Synthetic Polynucleotide
  source 1..86: mol_type = other DNA
  modified_base 9: mod_base = OTHER; note = Uracil
  modified_base 14: mod_base = OTHER; note = Uracil
  modified_base 23: mod_base = OTHER; note = Uracil
  modified_base 27: mod_base = OTHER; note = Uracil
  modified_base 34: mod_base = OTHER; note = Uracil
  modified_base 36..37: mod_base = OTHER; note = Uracil
  modified_base 47: mod_base = OTHER; note = Uracil
  modified_base 50..51: mod_base = OTHER; note = Uracil
  modified_base 53..55: mod_base = OTHER; note = Uracil
  modified_base 61: mod_base = OTHER; note = Uracil
  modified_base 70: mod_base = OTHER; note = Uracil
  modified_base 74: mod_base = OTHER; note = Uracil
  modified_base 80: mod_base = OTHER; note = Uracil
ggaggagctacgatgcggcccatcactcccacgtattgcgaacgcatcgttatttagccgtcagacgactcgctgaggatccgaca

SEQ ID NO: 171 - DNA, 87 bp, synthetic construct
  misc_feature 1..87: note = Synthetic Polynucleotide
  source 1..87: mol_type = other DNA
  modified_base 9: mod_base = OTHER; note = Uracil
  modified_base 14: mod_base = OTHER; note = Uracil
  modified_base 23..25: mod_base = OTHER; note = Uracil
  modified_base 28: mod_base = OTHER; note = Uracil
  modified_base 31: mod_base = OTHER; note = Uracil
  modified_base 34: mod_base = OTHER; note = Uracil
  modified_base 38: mod_base = OTHER; note = Uracil
  modified_base 43: mod_base = OTHER; note = Uracil
  modified_base 48..49: mod_base = OTHER; note = Uracil
  modified_base 54..56: mod_base = OTHER; note = Uracil
  modified_base 62: mod_base = OTHER; note = Uracil
  modified_base 71: mod_base = OTHER; note = Uracil
  modified_base 75: mod_base = OTHER; note = Uracil
  modified_base 81: mod_base = OTHER; note = Uracil
ggaggagctacgatgcggccgatttcgtcatcctccataccatcgccttaccgtttccgcgtcagacgactcgctgaggatccgaca

SEQ ID NO: 172 - DNA, 87 bp, synthetic construct
  misc_feature 1..87: note = Synthetic Polynucleotide
  source 1..87: mol_type = other DNA
  modified_base 9: mod_base = OTHER; note = Uracil
  modified_base 14: mod_base = OTHER; note = Uracil
  modified_base 30..31: mod_base = OTHER; note = Uracil
  modified_base 34: mod_base = OTHER; note = Uracil
  modified_base 40..41: mod_base = OTHER; note = Uracil
  modified_base 44: mod_base = OTHER; note = Uracil
  modified_base 48: mod_base = OTHER; note = Uracil
  modified_base 55: mod_base = OTHER; note = Uracil
  modified_base 62: mod_base = OTHER; note = Uracil
  modified_base 71: mod_base = OTHER; note = Uracil
  modified_base 75: mod_base = OTHER; note = Uracil
  modified_base 81: mod_base = OTHER; note = Uracil
ggaggagctacgatgcggggaagcaacacttagtcgggattgatacgtgcccagtcagcagtcagacgactcgctgaggatccgaca

SEQ ID NO: 173 - DNA, 86 bp, synthetic construct
  misc_feature 1..86: note = Synthetic Polynucleotide
  source 1..86: mol_type = other DNA
  modified_base 9: mod_base = OTHER; note = Uracil
  modified_base 14: mod_base = OTHER; note = Uracil
  modified_base 23: mod_base = OTHER; note = Uracil
  modified_base 27: mod_base = OTHER; note = Uracil
  modified_base 34: mod_base = OTHER; note = Uracil
  modified_base 36..37: mod_base = OTHER; note = Uracil
  modified_base 47: mod_base = OTHER; note = Uracil
  modified_base 50..51: mod_base = OTHER; note = Uracil
  modified_base 53..55: mod_base = OTHER; note = Uracil
  modified_base 61: mod_base = OTHER; note = Uracil
  modified_base 70: mod_base = OTHER; note = Uracil
  modified_base 74: mod_base = OTHER; note = Uracil
  modified_base 80: mod_base = OTHER; note = Uracil
ggaggagctacgatgcggccgatcactcccgcgtattgcgaacgcatcgttatttagccgtcagacgactcgctgaggatccgaca

SEQ ID NO: 174 - DNA, 87 bp, synthetic construct
  misc_feature 1..87: note = Synthetic Polynucleotide
  source 1..87: mol_type = other DNA
  modified_base 9: mod_base = OTHER; note = Uracil
  modified_base 14: mod_base = OTHER; note = Uracil
  modified_base 24..26: mod_base = OTHER; note = Uracil
  modified_base 29: mod_base = OTHER; note = Uracil
  modified_base 32: mod_base = OTHER; note = Uracil
  modified_base 35: mod_base = OTHER; note = Uracil
  modified_base 39: mod_base = OTHER; note = Uracil
  modified_base 44: mod_base = OTHER; note = Uracil
  modified_base 49..50: mod_base = OTHER; note = Uracil
  modified_base 55..56: mod_base = OTHER; note = Uracil
  modified_base 62: mod_base = OTHER; note = Uracil
  modified_base 71: mod_base = OTHER; note = Uracil
  modified_base 75: mod_base = OTHER; note = Uracil
  modified_base 81: mod_base = OTHER; note = Uracil
ggaggagctacgatgcggccgaatttcgtcatcctccataccatcgccttaccgttccgcgtcagacgactcgctgaggatccgaca

SEQ ID NO: 175 - DNA, 85 bp, synthetic construct
  misc_feature 1..85: note = Synthetic Polynucleotide
  source 1..85: mol_type = other DNA
  modified_base 9: mod_base = OTHER; note = Uracil
  modified_base 14: mod_base = OTHER; note = Uracil
  modified_base 23..25: mod_base = OTHER; note = Uracil
  modified_base 28: mod_base = OTHER; note = Uracil
  modified_base 31: mod_base = OTHER; note = Uracil
  modified_base 34: mod_base = OTHER; note = Uracil
  modified_base 38: mod_base = OTHER; note = Uracil
  modified_base 43: mod_base = OTHER; note = Uracil
  modified_base 47..48: mod_base = OTHER; note = Uracil
  modified_base 53..54: mod_base = OTHER; note = Uracil
  modified_base 60: mod_base = OTHER; note = Uracil
  modified_base 69: mod_base = OTHER; note = Uracil
  modified_base 73: mod_base = OTHER; note = Uracil
  modified_base 79: mod_base = OTHER; note = Uracil
ggaggagctacgatgcggccgatttcgtcatcctccataccatcgcttaccgttccgcgtcagacgactcgctgaggatccgaca

SEQ ID NO: 176 - DNA, 85 bp, synthetic construct
  misc_feature 1..85: note = Synthetic Polynucleotide
  source 1..85: mol_type = other DNA
  modified_base 9: mod_base = OTHER; note = Uracil
  modified_base 14: mod_base = OTHER; note = Uracil
  modified_base 23..25: mod_base = OTHER; note = Uracil
  modified_base 28: mod_base = OTHER; note = Uracil
  modified_base 31: mod_base = OTHER; note = Uracil
  modified_base 34: mod_base = OTHER; note = Uracil
  modified_base 38: mod_base = OTHER; note = Uracil
  modified_base 43: mod_base = OTHER; note = Uracil
  modified_base 53..54: mod_base = OTHER; note = Uracil
  modified_base 60: mod_base = OTHER; note = Uracil
  modified_base 69: mod_base = OTHER; note = Uracil
  modified_base 73: mod_base = OTHER; note = Uracil
  modified_base 79: mod_base = OTHER; note = Uracil
ggaggagctacgatgcggccgatttcgtcatcctccataccatcgcccaccgttccgcgtcagacgactcgctgaggatccgaca

SEQ ID NO: 177 - DNA, 84 bp, synthetic construct
  misc_feature 1..84: note = Synthetic Polynucleotide
  source 1..84: mol_type = other DNA
  modified_base 9: mod_base = OTHER; note = Uracil
  modified_base 14: mod_base = OTHER; note = Uracil
  modified_base 23..25: mod_base = OTHER; note = Uracil
  modified_base 31: mod_base = OTHER; note = Uracil
  modified_base 34: mod_base = OTHER; note = Uracil
  modified_base 38: mod_base = OTHER; note = Uracil
  modified_base 43: mod_base = OTHER; note = Uracil
  modified_base 48..49: mod_base = OTHER; note = Uracil
  modified_base 54..55: mod_base = OTHER; note = Uracil
  modified_base 59: mod_base = OTHER; note = Uracil
  modified_base 68: mod_base = OTHER; note = Uracil
  modified_base 72: mod_base = OTHER; note = Uracil
  modified_base 78: mod_base = OTHER; note = Uracil
ggaggagctacgatgcggccgatttcgtcatcctccataccatcgccttaccgttccgtcagacgactcgctgaggatccgaca

SEQ ID NO: 178 - DNA, 87 bp, synthetic construct
  misc_feature 1..87: note = Synthetic Polynucleotide
  source 1..87: mol_type = other DNA
  modified_base 9: mod_base = OTHER; note = Uracil
  modified_base 14: mod_base = OTHER; note = Uracil
  modified_base 30..31: mod_base = OTHER; note = Uracil
  modified_base 34: mod_base = OTHER; note = Uracil
  modified_base 40..41: mod_base = OTHER; note = Uracil
  modified_base 44: mod_base = OTHER; note = Uracil
  modified_base 48: mod_base = OTHER; note = Uracil
  modified_base 55: mod_base = OTHER; note = Uracil
  modified_base 58: mod_base = OTHER; note = Uracil
  modified_base 71: mod_base = OTHER; note = Uracil
  modified_base 75: mod_base = OTHER; note = Uracil
  modified_base 81: mod_base = OTHER; note = Uracil
ggaggagctacgatgcggggaagcaccacttagtcgcgattgatacgtgcgcagtcatcagacagacgactcgctgaggatccgaca

SEQ ID NO: 179 - DNA, 85 bp, synthetic construct
  misc_feature 1..85: note = Synthetic Polynucleotide
  source 1..85: mol_type = other DNA
  modified_base 9: mod_base = OTHER; note = Uracil
  modified_base 14: mod_base = OTHER; note = Uracil
  modified_base 19: mod_base = OTHER; note = Uracil
  modified_base 23..24: mod_base = OTHER; note = Uracil
  modified_base 26..27: mod_base = OTHER; note = Uracil
  modified_base 35..37: mod_base = OTHER; note = Uracil
  modified_base 39: mod_base = OTHER; note = Uracil
  modified_base 42: mod_base = OTHER; note = Uracil
  modified_base 44..45: mod_base = OTHER; note = Uracil
  modified_base 54: mod_base = OTHER; note = Uracil
  modified_base 57: mod_base = OTHER; note = Uracil
  modified_base 69: mod_base = OTHER; note = Uracil
  modified_base 73: mod_base = OTHER; note = Uracil
  modified_base 79: mod_base = OTHER; note = Uracil
ggaggagctacgatgcggtgaattcttccggcactttgtcatcttcacgcccatgctgcacagacgactcgctgaggatccgaca

SEQ ID NO: 180 - DNA, 86 bp, synthetic construct
  misc_feature 1..86: note = Synthetic Polynucleotide
  source 1..86: mol_type = other DNA
  modified_base 9: mod_base = OTHER; note = Uracil
  modified_base 14: mod_base = OTHER; note = Uracil
  modified_base 23..25: mod_base = OTHER; note = Uracil
  modified_base 28: mod_base = OTHER; note = Uracil
  modified_base 31: mod_base = OTHER; note = Uracil
  modified_base 34: mod_base = OTHER; note = Uracil
  modified_base 43: mod_base = OTHER; note = Uracil
  modified_base 48..49: mod_base = OTHER; note = Uracil
  modified_base 54..55: mod_base = OTHER; note = Uracil
  modified_base 61: mod_base = OTHER; note = Uracil
  modified_base 70: mod_base = OTHER; note = Uracil
  modified_base 74: mod_base = OTHER; note = Uracil
  modified_base 80: mod_base = OTHER; note = Uracil
ggaggagctacgatgcggccgatttcgtcatcctccaagccatcgccttaccgttccgcgtcagacgactcgctgaggatccgaca

SEQ ID NO: 181 - DNA, 85 bp, synthetic construct
  misc_feature 1..85: note = Synthetic Polynucleotide
  source 1..85: mol_type = other DNA
  modified_base 9: mod_base = OTHER; note = Uracil
  modified_base 14: mod_base = OTHER; note = Uracil
  modified_base 19: mod_base = OTHER; note = Uracil
  modified_base 23..24: mod_base = OTHER; note = Uracil
  modified_base 26..27: mod_base = OTHER; note = Uracil
  modified_base 35..37: mod_base = OTHER; note = Uracil
  modified_base 39: mod_base = OTHER; note = Uracil
  modified_base 42: mod_base = OTHER; note = Uracil
  modified_base 44..45: mod_base = OTHER; note = Uracil
  modified_base 54: mod_base = OTHER; note = Uracil
  modified_base 57: mod_base = OTHER; note = Uracil
  modified_base 69: mod_base = OTHER; note = Uracil
  modified_base 73: mod_base = OTHER; note = Uracil
  modified_base 79: mod_base = OTHER; note = Uracil
ggaggagctacgatgcggtgaattcttccgacactttgtcatcttcacccccatgctgcacagacgactcgctgaggatccgaca

SEQ ID NO: 182 - DNA, 87 bp, synthetic construct
  misc_feature 1..87: note = Synthetic Polynucleotide
  source 1..87: mol_type = other DNA
  modified_base 9: mod_base = OTHER; note = Uracil
  modified_base 14: mod_base = OTHER; note = Uracil
  modified_base 30..31: mod_base = OTHER; note = Uracil
  modified_base 34: mod_base = OTHER; note = Uracil
  modified_base 40..41: mod_base = OTHER; note = Uracil
  modified_base 44: mod_base = OTHER; note = Uracil
  modified_base 48: mod_base = OTHER; note = Uracil
  modified_base 55: mod_base = OTHER; note = Uracil
  modified_base 58: mod_base = OTHER; note = Uracil
  modified_base 71: mod_base = OTHER; note = Uracil
  modified_base 75: mod_base = OTHER; note = Uracil
  modified_base 81: mod_base = OTHER; note = Uracil
ggaggagctacgatgcggggaagccacacttagtcgcgattgatacgtgcgcagtcatcagacagacgactcgctgaggatccgaca

SEQ ID NO: 183 - DNA, 85 bp, synthetic construct
  misc_feature 1..85: note = Synthetic Polynucleotide
  source 1..85: mol_type = other DNA
  modified_base 9: mod_base = OTHER; note = Uracil
  modified_base 14: mod_base = OTHER; note = Uracil
  modified_base 22: mod_base = OTHER; note = Uracil
  modified_base 24: mod_base = OTHER; note = Uracil
  modified_base 27..28: mod_base = OTHER; note = Uracil
  modified_base 30: mod_base = OTHER; note = Uracil
  modified_base 33: mod_base = OTHER; note = Uracil
  modified_base 38: mod_base = OTHER; note = Uracil
  modified_base 49: mod_base = OTHER; note = Uracil
  modified_base 51: mod_base = OTHER; note = Uracil
  modified_base 53: mod_base = OTHER; note = Uracil
  modified_base 57: mod_base = OTHER; note = Uracil
  modified_base 69: mod_base = OTHER; note = Uracil
  modified_base 73: mod_base = OTHER; note = Uracil
  modified_base 79: mod_base = OTHER; note = Uracil
ggaggagctacgatgcggccgtctcgttctcatcccatgcacgaaacctctctcactgcacagacgactcgctgaggatccgaca

SEQ ID NO: 184 - DNA, 84 bp, synthetic construct
  misc_feature 1..84: note = Synthetic Polynucleotide
  source 1..84: mol_type = other DNA
  modified_base 9: mod_base = OTHER; note = Uracil
  modified_base 14: mod_base = OTHER; note = Uracil
  modified_base 27: mod_base = OTHER; note = Uracil
  modified_base 30..31: mod_base = OTHER; note = Uracil
  modified_base 34: mod_base = OTHER; note = Uracil
  modified_base 37: mod_base = OTHER; note = Uracil
  modified_base 45: mod_base = OTHER; note = Uracil
  modified_base 54..55: mod_base = OTHER; note = Uracil
  modified_base 59: mod_base = OTHER; note = Uracil
  modified_base 68: mod_base = OTHER; note = Uracil
  modified_base 72: mod_base = OTHER; note = Uracil
  modified_base 78: mod_base = OTHER; note = Uracil
ggaggagctacgatgcggacggaggatagttgctaatcgagccctgccgacgcttcagtcagacgactcgctgaggatccgaca

SEQ ID NO: 185 - DNA, 85 bp, synthetic construct
  misc_feature 1..85: note = Synthetic Polynucleotide
  source 1..85: mol_type = other DNA
  modified_base 9: mod_base = OTHER; note = Uracil
  modified_base 14: mod_base = OTHER; note = Uracil
  modified_base 23..25: mod_base = OTHER; note = Uracil
  modified_base 30: mod_base = OTHER; note = Uracil
  modified_base 32: mod_base = OTHER; note = Uracil
  modified_base 41: mod_base = OTHER; note = Uracil
  modified_base 53..54: mod_base = OTHER; note = Uracil
  modified_base 69: mod_base = OTHER; note = Uracil
  modified_base 73: mod_base = OTHER; note = Uracil
  modified_base 79: mod_base = OTHER; note = Uracil
ggaggagctacgatgcggacggtttcacctctaggagcactgaaagccaaccttcgcgcacagacgactcgctgaggatccgaca

SEQ ID NO: 186 - DNA, 85 bp, synthetic construct
  misc_feature 1..85: note = Synthetic Polynucleotide
  source 1..85: mol_type = other DNA
  modified_base 9: mod_base = OTHER; note = Uracil
  modified_base 14: mod_base = OTHER; note = Uracil
  modified_base 19: mod_base = OTHER; note = Uracil
  modified_base 23..24: mod_base = OTHER; note = Uracil
  modified_base 27: mod_base = OTHER; note = Uracil
  modified_base 35..37: mod_base = OTHER; note = Uracil
  modified_base 39: mod_base = OTHER; note = Uracil
  modified_base 42: mod_base = OTHER; note = Uracil
  modified_base 44..45: mod_base = OTHER; note = Uracil
  modified_base 54: mod_base = OTHER; note = Uracil
  modified_base 57: mod_base = OTHER; note = Uracil
  modified_base 69: mod_base = OTHER; note = Uracil
  modified_base 73: mod_base = OTHER; note = Uracil
  modified_base 79: mod_base = OTHER; note = Uracil
ggaggagctacgatgcggtgaattcctccggcactttgtcatcttcacccccatgctgcacagacgactcgctgaggatccgaca

SEQ ID NO: 187 - DNA, 86 bp, synthetic construct
  misc_feature 1..86: note = Synthetic Polynucleotide
  source 1..86: mol_type = other DNA
  modified_base 9: mod_base = OTHER; note = Uracil
  modified_base 14: mod_base = OTHER; note = Uracil
  modified_base 23..25: mod_base = OTHER; note = Uracil
  modified_base 28: mod_base = OTHER; note = Uracil
  modified_base 31: mod_base = OTHER; note = Uracil
  modified_base 34: mod_base = OTHER; note = Uracil
  modified_base 40: mod_base = OTHER; note = Uracil
  modified_base 43: mod_base = OTHER; note = Uracil
  modified_base 48..49: mod_base = OTHER; note = Uracil
  modified_base 54..55: mod_base = OTHER; note = Uracil
  modified_base 61: mod_base = OTHER; note = Uracil
  modified_base 70: mod_base = OTHER; note = Uracil
  modified_base 74: mod_base = OTHER; note = Uracil
  modified_base 80: mod_base = OTHER; note = Uracil
ggaggagctacgatgcggccgatttcgtcatcctccacatcatcgccttaccgttccgcgtcagacgactcgctgaggatccgaca

SEQ ID NO: 188 - DNA, 85 bp, synthetic construct
  misc_feature 1..85: note = Synthetic Polynucleotide
  source 1..85: mol_type = other DNA
  modified_base 9: mod_base = OTHER; note = Uracil
  modified_base 14: mod_base = OTHER; note = Uracil
  modified_base 23..25: mod_base = OTHER; note = Uracil
  modified_base 28: mod_base = OTHER; note = Uracil
  modified_base 31: mod_base = OTHER; note = Uracil
  modified_base 38: mod_base = OTHER; note = Uracil
  modified_base 43: mod_base = OTHER; note = Uracil
  modified_base 48..49: mod_base = OTHER; note = Uracil
  modified_base 53..54: mod_base = OTHER; note = Uracil
  modified_base 60: mod_base = OTHER; note = Uracil
  modified_base 69: mod_base = OTHER; note = Uracil
  modified_base 73: mod_base = OTHER; note = Uracil
  modified_base 79: mod_base = OTHER; note = Uracil
ggaggagctacgatgcggccgatttcgtcatcccccataccatcgccttaccttccgcgtcagacgactcgctgaggatccgaca

SEQ ID NO: 189 - DNA, 84 bp, synthetic construct
  misc_feature 1..84: note = Synthetic Polynucleotide
  source 1..84: mol_type = other DNA
  modified_base 9: mod_base = OTHER; note = Uracil
  modified_base 14: mod_base = OTHER; note = Uracil
  modified_base 19: mod_base = OTHER; note = Uracil
  modified_base 23..24: mod_base = OTHER; note = Uracil
  modified_base 26..27: mod_base = OTHER; note = Uracil
  modified_base 35..36: mod_base = OTHER; note = Uracil
  modified_base 38: mod_base = OTHER; note = Uracil
  modified_base 41: mod_base = OTHER; note = Uracil
  modified_base 43..44: mod_base = OTHER; note = Uracil
  modified_base 53: mod_base = OTHER; note = Uracil
  modified_base 56: mod_base = OTHER; note = Uracil
  modified_base 68: mod_base = OTHER; note = Uracil
  modified_base 72: mod_base = OTHER; note = Uracil
  modified_base 78: mod_base = OTHER; note = Uracil
ggaggagctacgatgcggtgaattcttccggcacttgtcatcttcacccccatgctgcacagacgactcgctgaggatccgaca

SEQ ID NO: 190 - DNA, 85 bp, synthetic construct
  misc_feature 1..85: note = Synthetic Polynucleotide
  source 1..85: mol_type = other DNA
  modified_base 9: mod_base = OTHER; note = Uracil
  modified_base 14: mod_base = OTHER; note = Uracil
  modified_base 22: mod_base = OTHER; note = Uracil
  modified_base 24: mod_base = OTHER; note = Uracil
  modified_base 28: mod_base = OTHER; note = Uracil
  modified_base 30: mod_base = OTHER; note = Uracil
  modified_base 33: mod_base = OTHER; note = Uracil
  modified_base 38: mod_base = OTHER; note = Uracil
  modified_base 49: mod_base = OTHER; note = Uracil
  modified_base 51: mod_base = OTHER; note = Uracil
  modified_base 53: mod_base = OTHER; note = Uracil
  modified_base 57: mod_base = OTHER; note = Uracil
  modified_base 69: mod_base = OTHER; note = Uracil
  modified_base 73: mod_base = OTHER; note = Uracil
  modified_base 79: mod_base = OTHER; note = Uracil
ggaggagctacgatgcggccgtctcgctctcatcccatgcgcgaaacctctctcactgcacagacgactcgctgaggatccgaca

SEQ ID NO: 191 - DNA, 85 bp, synthetic construct
  misc_feature 1..85: note = Synthetic Polynucleotide
  source 1..85: mol_type = other DNA
  modified_base 9: mod_base = OTHER; note = Uracil
  modified_base 14: mod_base = OTHER; note = Uracil
  modified_base 19: mod_base = OTHER; note = Uracil
  modified_base 23..24: mod_base = OTHER; note = Uracil
  modified_base 26..27: mod_base = OTHER; note = Uracil
  modified_base 35..37: mod_base = OTHER; note = Uracil
  modified_base 39: mod_base = OTHER; note = Uracil
  modified_base 42: mod_base = OTHER; note = Uracil
  modified_base 44..45: mod_base = OTHER; note = Uracil
  modified_base 52: mod_base = OTHER; note = Uracil
  modified_base 54: mod_base = OTHER; note = Uracil
  modified_base 57: mod_base = OTHER; note = Uracil
  modified_base 69: mod_base = OTHER; note = Uracil
  modified_base 73: mod_base = OTHER; note = Uracil
  modified_base 79: mod_base = OTHER; note = Uracil
ggaggagctacgatgcggtgaattcttccggcactttgtcatcttcacccctatgctgcacagacgactcgctgaggatccgaca

SEQ ID NO: 192 - DNA, 87 bp, synthetic construct
  misc_feature 1..87: note = Synthetic Polynucleotide
  source 1..87: mol_type = other DNA
  modified_base 9: mod_base = OTHER; note = Uracil
  modified_base 14: mod_base = OTHER; note = Uracil
  modified_base 23..26: mod_base = OTHER; note = Uracil
  modified_base 29: mod_base = OTHER; note = Uracil
  modified_base 32: mod_base = OTHER; note = Uracil
  modified_base 35: mod_base = OTHER; note = Uracil
  modified_base 39: mod_base = OTHER; note = Uracil
  modified_base 44: mod_base = OTHER; note = Uracil
  modified_base 50: mod_base = OTHER; note = Uracil
  modified_base 55..56: mod_base = OTHER; note = Uracil
  modified_base 62: mod_base = OTHER; note = Uracil
  modified_base 71: mod_base = OTHER; note = Uracil
  modified_base 75: mod_base = OTHER; note = Uracil
  modified_base 81: mod_base = OTHER; note = Uracil
ggaggagctacgatgcggccgattttcgtcatcctccataccatcgccctaccgttccgcgtcagacgactcgctgaggatccgaca

SEQ ID NO: 193 - DNA, 86 bp, synthetic construct
  misc_feature 1..86: note = Synthetic Polynucleotide
  source 1..86: mol_type = other DNA
  modified_base 9: mod_base = OTHER; note = Uracil
  modified_base 14: mod_base = OTHER; note = Uracil
  modified_base 23: mod_base = OTHER; note = Uracil
  modified_base 27: mod_base = OTHER; note = Uracil
  modified_base 34: mod_base = OTHER; note = Uracil
  modified_base 36..37: mod_base = OTHER; note = Uracil
  modified_base 47: mod_base = OTHER; note = Uracil
  modified_base 50..51: mod_base = OTHER; note = Uracil
  modified_base 53..55: mod_base = OTHER; note = Uracil
  modified_base 59: mod_base = OTHER; note = Uracil
  modified_base 61: mod_base = OTHER; note = Uracil
  modified_base 70: mod_base = OTHER; note = Uracil
  modified_base 74: mod_base = OTHER; note = Uracil
  modified_base 80: mod_base = OTHER; note = Uracil
ggaggagctacgatgcggcccatcactcccgcgtattgcgaacgcatcgttatttagctgtcagacgactcgctgaggatccgaca

SEQ ID NO: 194 - DNA, 86 bp, synthetic construct
  misc_feature 1..86: note = Synthetic Polynucleotide
  source 1..86: mol_type = other DNA
  modified_base 9: mod_base = OTHER; note = Uracil
  modified_base 14: mod_base = OTHER; note = Uracil
  modified_base 23: mod_base = OTHER; note = Uracil
  modified_base 27: mod_base = OTHER; note = Uracil
  modified_base 34: mod_base = OTHER; note = Uracil
  modified_base 36..37: mod_base = OTHER; note = Uracil
  modified_base 47: mod_base = OTHER; note = Uracil
  modified_base 50..51: mod_base = OTHER; note = Uracil
  modified_base 53..55: mod_base = OTHER; note = Uracil
  modified_base 61: mod_base = OTHER; note = Uracil
  modified_base 70: mod_base = OTHER; note = Uracil
  modified_base 74: mod_base = OTHER; note = Uracil
  modified_base 80: mod_base = OTHER; note = Uracil
ggaggagctacgatgcggcccatcgctcccgcgtattgcgaacgcatcgttatttagccgtcagacgactcgctgaggatccgaca

SEQ ID NO: 195 - DNA, 86 bp, synthetic construct
  misc_feature 1..86: note = Synthetic Polynucleotide
  source 1..86: mol_type = other DNA
  modified_base 9: mod_base = OTHER; note = Uracil
  modified_base 14: mod_base = OTHER; note = Uracil
  modified_base 23..25: mod_base = OTHER; note = Uracil
  modified_base 31: mod_base = OTHER; note = Uracil
  modified_base 34: mod_base = OTHER; note = Uracil
  modified_base 43: mod_base = OTHER; note = Uracil
  modified_base 48..49: mod_base = OTHER; note = Uracil
  modified_base 54..55: mod_base = OTHER; note = Uracil
  modified_base 61: mod_base = OTHER; note = Uracil
  modified_base 70: mod_base = OTHER; note = Uracil
  modified_base 74: mod_base = OTHER; note = Uracil
  modified_base 80: mod_base = OTHER; note = Uracil
ggaggagctacgatgcggccgatttcggcatcctccacaccatcgccttaccgttccgcgtcagacgactcgctgaggatccgaca

SEQ ID NO: 196 - DNA, 84 bp, synthetic construct
  misc_feature 1..84: note = Synthetic Polynucleotide
  source 1..84: mol_type = other DNA
  modified_base 9: mod_base = OTHER; note = Uracil
  modified_base 14: mod_base = OTHER; note = Uracil
  modified_base 23..25: mod_base = OTHER; note = Uracil
  modified_base 28: mod_base = OTHER; note = Uracil
  modified_base 31: mod_base = OTHER; note = Uracil
  modified_base 34: mod_base = OTHER; note = Uracil
  modified_base 38: mod_base = OTHER; note = Uracil
  modified_base 41: mod_base = OTHER; note = Uracil
  modified_base 46..47: mod_base = OTHER; note = Uracil
  modified_base 52..53: mod_base = OTHER; note = Uracil
  modified_base 59: mod_base = OTHER; note = Uracil
  modified_base 68: mod_base = OTHER; note = Uracil
  modified_base 72: mod_base = OTHER; note = Uracil
  modified_base 78: mod_base = OTHER; note = Uracil
ggaggagctacgatgcggccgatttcgtcatcctccatcatcgccttaccgttccgcgtcagacgactcgctgaggatccgaca

SEQ ID NO: 197 - DNA, 85 bp, synthetic construct
  misc_feature 1..85: note = Synthetic Polynucleotide
  source 1..85: mol_type = other DNA
  modified_base 9: mod_base = OTHER; note = Uracil
  modified_base 14: mod_base = OTHER; note = Uracil
  modified_base 19: mod_base = OTHER; note = Uracil
  modified_base 24: mod_base = OTHER; note = Uracil
  modified_base 26..27: mod_base = OTHER; note = Uracil
  modified_base 35..37: mod_base = OTHER; note = Uracil
  modified_base 39: mod_base = OTHER; note = Uracil
  modified_base 42: mod_base = OTHER; note = Uracil
  modified_base 44..45: mod_base = OTHER; note = Uracil
  modified_base 54: mod_base = OTHER; note = Uracil
  modified_base 57: mod_base = OTHER; note = Uracil
  modified_base 69: mod_base = OTHER; note = Uracil
  modified_base 73: mod_base = OTHER; note = Uracil
  modified_base 79: mod_base = OTHER; note = Uracil
ggaggagctacgatgcggtgaactcttccggcactttgtcatcttcacccccatgctgcacagacgactcgctgaggatccgaca

SEQ ID NO: 198 - DNA, 86 bp, synthetic construct
  misc_feature 1..86: note = Synthetic Polynucleotide
  source 1..86: mol_type = other DNA
  modified_base 9: mod_base = OTHER; note = Uracil
  modified_base 14: mod_base = OTHER; note = Uracil
  modified_base 23: mod_base = OTHER; note = Uracil
  modified_base 27: mod_base = OTHER; note = Uracil
  modified_base 34: mod_base = OTHER; note = Uracil
  modified_base 36..37: mod_base = OTHER; note = Uracil
  modified_base 47: mod_base = OTHER; note = Uracil
  modified_base 50..51: mod_base = OTHER; note = Uracil
  modified_base 53..54: mod_base = OTHER; note = Uracil
  modified_base 70: mod_base = OTHER; note = Uracil
  modified_base 61: mod_base = OTHER; note = Uracil
  modified_base 74: mod_base = OTHER; note = Uracil
  modified_base 80: mod_base = OTHER; note = Uracil
ggaggagctacgatgcggcccatcactcccgcgtattgcgaacgcatcgttattcagccgtcagacgactcgctgaggatccgaca

SEQ ID NO: 199 - DNA, 85 bp, synthetic construct
  misc_feature 1..85: note = Synthetic Polynucleotide
  source 1..85: mol_type = other DNA
  modified_base 9: mod_base = OTHER; note = Uracil
  modified_base 14: mod_base = OTHER; note = Uracil
  modified_base 22: mod_base = OTHER; note = Uracil
  modified_base 24: mod_base = OTHER; note = Uracil
  modified_base 28: mod_base = OTHER; note = Uracil
  modified_base 30: mod_base = OTHER; note = Uracil
  modified_base 38: mod_base = OTHER; note = Uracil
  modified_base 69: mod_base = OTHER; note = Uracil
  modified_base 49: mod_base = OTHER; note = Uracil
  modified_base 53: mod_base = OTHER; note = Uracil
  modified_base 51: mod_base = OTHER; note = Uracil
  modified_base 33: mod_base = OTHER; note = Uracil
  modified_base 73: mod_base = OTHER; note = Uracil
  modified_base 57: mod_base = OTHER; note = Uracil
  modified_base 79: mod_base = OTHER; note = Uracil
ggaggagctacgatgcggccgtctcgctctcatcccatgcacaaaacctctctcactgcacagacgactcgctgaggatccgaca

SEQ ID NO: 200 - DNA, 87 bp, synthetic construct
  misc_feature 1..87: note = Synthetic Polynucleotide
  source 1..87: mol_type = other DNA
  modified_base 9: mod_base = OTHER; note = Uracil
  modified_base 14: mod_base = OTHER; note = Uracil
  modified_base 23..25: mod_base = OTHER; note = Uracil
  modified_base 28: mod_base = OTHER; note = Uracil
  modified_base 31: mod_base = OTHER; note = Uracil
  modified_base 38: mod_base = OTHER; note = Uracil
  modified_base 43: mod_base = OTHER; note = Uracil
  modified_base 48..49: mod_base = OTHER; note = Uracil
  modified_base 54..55: mod_base = OTHER; note = Uracil
  modified_base 62: mod_base = OTHER; note = Uracil
  modified_base 71: mod_base = OTHER; note = Uracil
  modified_base 75: mod_base = OTHER; note = Uracil
  modified_base 81: mod_base = OTHER; note = Uracil
ggaggagctacgatgcggccgatttcgtcatcccccataccatcgccttaccgttccgcagtcagacgactcgctgaggatccgaca

SEQ ID NO: 201 - DNA, 86 bp, synthetic construct
  misc_feature 1..86: note = Synthetic Polynucleotide
  source 1..86: mol_type = other DNA
  modified_base 9: mod_base = OTHER; note = Uracil
  modified_base 14: mod_base = OTHER; note = Uracil
  modified_base 23..25: mod_base = OTHER; note = Uracil
  modified_base 28: mod_base = OTHER; note = Uracil
  modified_base 31: mod_base = OTHER; note = Uracil
  modified_base 34: mod_base = OTHER; note = Uracil
  modified_base 43: mod_base = OTHER; note = Uracil
  modified_base 48..49: mod_base = OTHER; note = Uracil
  modified_base 52: mod_base = OTHER; note = Uracil
  modified_base 54..55: mod_base = OTHER; note = Uracil
  modified_base 61: mod_base = OTHER; note = Uracil
  modified_base 70: mod_base = OTHER; note = Uracil
  modified_base 74: mod_base = OTHER; note = Uracil
  modified_base 80: mod_base = OTHER; note = Uracil
ggaggagctacgatgcggccgatttcgtcatcctccacaccatcgccttactgttccgcgtcagacgactcgctgaggatccgaca

SEQ ID NO: 202 - DNA, 85 bp, synthetic construct
  misc_feature 1..85: note = Synthetic Polynucleotide
  source 1..85: mol_type = other DNA
  modified_base 9: mod_base = OTHER; note = Uracil
  modified_base 14: mod_base = OTHER; note = Uracil
  modified_base 22: mod_base = OTHER; note = Uracil
  modified_base 24: mod_base = OTHER; note = Uracil
  modified_base 28: mod_base = OTHER; note = Uracil
  modified_base 30: mod_base = OTHER; note = Uracil
  modified_base 33: mod_base = OTHER; note = Uracil
  modified_base 38: mod_base = OTHER; note = Uracil
  modified_base 47: mod_base = OTHER; note = Uracil
  modified_base 49: mod_base = OTHER; note = Uracil
  modified_base 51: mod_base = OTHER; note = Uracil
  modified_base 53: mod_base = OTHER; note = Uracil
  modified_base 57: mod_base = OTHER; note = Uracil
  modified_base 69: mod_base = OTHER; note = Uracil
  modified_base 73: mod_base = OTHER; note = Uracil
  modified_base 79: mod_base = OTHER; note = Uracil
ggaggagctacgatgcggccgtctcgctctcatcccatgcacgaaatctctctcactgcacagacgactcgctgaggatccgaca

SEQ ID NO: 203 - DNA, 86 bp, synthetic construct
  misc_feature 1..86: note = Synthetic Polynucleotide
  source 1..86: mol_type = other DNA
  modified_base 9: mod_base = OTHER; note = Uracil
  modified_base 14: mod_base = OTHER; note = Uracil
  modified_base 23: mod_base = OTHER; note = Uracil
  modified_base 27: mod_base = OTHER; note = Uracil
  modified_base 34: mod_base = OTHER; note = Uracil
  modified_base 36..37: mod_base = OTHER; note = Uracil
  modified_base 47: mod_base = OTHER; note = Uracil
  modified_base 51: mod_base = OTHER; note = Uracil
  modified_base 53..55: mod_base = OTHER; note = Uracil
  modified_base 61: mod_base = OTHER; note = Uracil
  modified_base 70: mod_base = OTHER; note = Uracil
  modified_base 74: mod_base = OTHER; note = Uracil
  modified_base 80: mod_base = OTHER; note = Uracil
ggaggagctacgatgcggcccatcactcccgcgtattgcgaacgcatcgctatttagccgtcagacgactcgctgaggatccgaca

SEQ ID NO: 204 - DNA, 85 bp, synthetic construct
  misc_feature 1..85: note = Synthetic Polynucleotide
  source 1..85: mol_type = other DNA
  modified_base 9: mod_base = OTHER; note = Uracil
  modified_base 14: mod_base = OTHER; note = Uracil
  modified_base 23..25: mod_base = OTHER; note = Uracil
  modified_base 28: mod_base = OTHER; note = Uracil
  modified_base 31: mod_base = OTHER; note = Uracil
  modified_base 34: mod_base = OTHER; note = Uracil
  modified_base 37: mod_base = OTHER; note = Uracil
  modified_base 42: mod_base = OTHER; note = Uracil
  modified_base 47..48: mod_base = OTHER; note = Uracil
  modified_base 53..54: mod_base = OTHER; note = Uracil
  modified_base 60: mod_base = OTHER; note = Uracil
  modified_base 69: mod_base = OTHER; note = Uracil
  modified_base 73: mod_base = OTHER; note = Uracil
  modified_base 79: mod_base = OTHER; note = Uracil
ggaggagctacgatgcggccgatttcgtcatcctcataccatcgccttaccgttccgcgtcagacgactcgctgaggatccgaca

SEQ ID NO: 205 - DNA, 86 bp, synthetic construct
  misc_feature 1..86: note = Synthetic Polynucleotide
  source 1..86: mol_type = other DNA
  modified_base 9: mod_base = OTHER; note = Uracil
  modified_base 14: mod_base = OTHER; note = Uracil
  modified_base 22..23: mod_base = OTHER; note = Uracil
  modified_base 25..27: mod_base = OTHER; note = Uracil
  modified_base 31: mod_base = OTHER; note = Uracil
  modified_base 33: mod_base = OTHER; note = Uracil
  modified_base 35: mod_base = OTHER; note = Uracil
  modified_base 43..44: mod_base = OTHER; note = Uracil
  modified_base 50..52: mod_base = OTHER; note = Uracil
  modified_base 54: mod_base = OTHER; note = Uracil
  modified_base 58: mod_base = OTHER; note = Uracil
  modified_base 61: mod_base = OTHER; note = Uracil
  modified_base 70: mod_base = OTHER; note = Uracil
  modified_base 74: mod_base = OTHER; note = Uracil
  modified_base 80: mod_base = OTHER; note = Uracil
ggaggagctacgatgcggaccttgtttccctctgtaccccacttccccatttctccctgctcagacgactcgctgaggatccgaca

SEQ ID NO: 206 - DNA, 85 bp, synthetic construct
  misc_feature 1..85: note = Synthetic Polynucleotide
  source 1..85: mol_type = other DNA
  modified_base 9: mod_base = OTHER; note = Uracil
  modified_base 14: mod_base = OTHER; note = Uracil
  modified_base 19: mod_base = OTHER; note = Uracil
  modified_base 23..24: mod_base = OTHER; note = Uracil
  modified_base 26..27: mod_base = OTHER; note = Uracil
  modified_base 35..37: mod_base = OTHER; note = Uracil
  modified_base 39: mod_base = OTHER; note = Uracil
  modified_base 42: mod_base = OTHER; note = Uracil
  modified_base 44: mod_base = OTHER; note = Uracil
  modified_base 54: mod_base = OTHER; note = Uracil
  modified_base 57: mod_base = OTHER; note = Uracil
  modified_base 69: mod_base = OTHER; note = Uracil
  modified_base 73: mod_base = OTHER; note = Uracil
  modified_base 79: mod_base = OTHER; note = Uracil
ggaggagctacgatgcggtgaattcttccggcactttgtcatctccacccccatgctgcacagacgactcgctgaggatccgaca

SEQ ID NO: 207 - DNA, 86 bp, synthetic construct
  misc_feature 1..86: note = Synthetic Polynucleotide
  source 1..86: mol_type = other DNA
  modified_base 9: mod_base = OTHER; note = Uracil
  modified_base 14: mod_base = OTHER; note = Uracil
  modified_base 19: mod_base = OTHER; note = Uracil
  modified_base 23..25: mod_base = OTHER; note = Uracil
  modified_base 28: mod_base = OTHER; note = Uracil
  modified_base 31: mod_base = OTHER; note = Uracil
  modified_base 34: mod_base = OTHER; note = Uracil
  modified_base 48..49: mod_base = OTHER; note = Uracil
  modified_base 43: mod_base = OTHER; note = Uracil
  modified_base 52: mod_base = OTHER; note = Uracil
  modified_base 54..55: mod_base = OTHER; note = Uracil
  modified_base 61: mod_base = OTHER; note = Uracil
  modified_base 70: mod_base = OTHER; note = Uracil
  modified_base 74: mod_base = OTHER; note = Uracil
  modified_base 80: mod_base = OTHER; note = Uracil
ggaggagctacgatgcggtcgatttcgtcatcctccataccatcgccttactgttccgcgtcagacgactcgctgaggatccgaca

SEQ ID NO: 208 - DNA, 86 bp, synthetic construct
  misc_feature 1..86: note = Synthetic Polynucleotide
  source 1..86: mol_type = other DNA
  modified_base 9: mod_base = OTHER; note = Uracil
  modified_base 14: mod_base = OTHER; note = Uracil
  modified_base 23..25: mod_base = OTHER; note = Uracil
  modified_base 28: mod_base = OTHER; note = Uracil
  modified_base 31: mod_base = OTHER; note = Uracil
  modified_base 34: mod_base = OTHER; note = Uracil
  modified_base 38: mod_base = OTHER; note = Uracil
  modified_base 43: mod_base = OTHER; note = Uracil
  modified_base 46: mod_base = OTHER; note = Uracil
  modified_base 48..49: mod_base = OTHER; note = Uracil
  modified_base 53..55: mod_base = OTHER; note = Uracil
  modified_base 61: mod_base = OTHER; note = Uracil
  modified_base 70: mod_base = OTHER; note = Uracil
  modified_base 74: mod_base = OTHER; note = Uracil
  modified_base 80: mod_base = OTHER; note = Uracil
ggaggagctacgatgcggccgatttcgtcatcctccataccatcgtcttacctttccgcgtcagacgactcgctgaggatccgaca

SEQ ID NO: 209 - DNA, 85 bp, synthetic construct
  misc_feature 1..85: note = Synthetic Polynucleotide
  source 1..85: mol_type = other DNA
  modified_base 9: mod_base = OTHER; note = Uracil
  modified_base 14: mod_base = OTHER; note = Uracil
  modified_base 23..25: mod_base = OTHER; note = Uracil
  modified_base 28: mod_base = OTHER; note = Uracil
  modified_base 31: mod_base = OTHER; note = Uracil
  modified_base 34: mod_base = OTHER; note = Uracil
  modified_base 38: mod_base = OTHER; note = Uracil
  modified_base 43: mod_base = OTHER; note = Uracil
  modified_base 48..49: mod_base = OTHER; note = Uracil
  modified_base 53..54: mod_base = OTHER; note = Uracil
  modified_base 60: mod_base = OTHER; note = Uracil
  modified_base 69: mod_base = OTHER; note = Uracil
  modified_base 73: mod_base = OTHER; note = Uracil
  modified_base 79: mod_base = OTHER; note = Uracil
ggaggagctacgatgcggccgatttcgtcatcctccataccatcgccttacgttccgcgtcagacgactcgctgaggatccgaca

SEQ ID NO: 210 - DNA, 86 bp, synthetic construct
  misc_feature 1..86: note = Synthetic Polynucleotide
  source 1..86: mol_type = other DNA
  modified_base 9: mod_base = OTHER; note = Uracil
  modified_base 14: mod_base = OTHER; note = Uracil
  modified_base 23..25: mod_base = OTHER; note = Uracil
  modified_base 28: mod_base = OTHER; note = Uracil
  modified_base 31: mod_base = OTHER; note = Uracil
  modified_base 34: mod_base = OTHER; note = Uracil
  modified_base 38: mod_base = OTHER; note = Uracil
  modified_base 43: mod_base = OTHER; note = Uracil
  modified_base 48..49: mod_base = OTHER; note = Uracil
  modified_base 55: mod_base = OTHER; note = Uracil
  modified_base 61: mod_base = OTHER; note = Uracil
  modified_base 70: mod_base = OTHER; note = Uracil
  modified_base 74: mod_base = OTHER; note = Uracil
  modified_base 80: mod_base = OTHER; note = Uracil
ggaggagctacgatgcggccgatttcgtcatcctccataccatcgccttaccactccgcgtcagacgactcgctgaggatccgaca

SEQ ID NO: 211 - DNA, 84 bp, synthetic construct
  misc_feature 1..84: note = Synthetic Polynucleotide
  source 1..84: mol_type = other DNA
  modified_base 9: mod_base = OTHER; note = Uracil
  modified_base 14: mod_base = OTHER; note = Uracil
  modified_base 27: mod_base = OTHER; note = Uracil
  modified_base 30..31: mod_base = OTHER; note = Uracil
  modified_base 34: mod_base = OTHER; note = Uracil
  modified_base 37: mod_base = OTHER; note = Uracil
  modified_base 45: mod_base = OTHER; note = Uracil
  modified_base 48: mod_base = OTHER; note = Uracil
  modified_base 54..55: mod_base = OTHER; note = Uracil
  modified_base 68: mod_base = OTHER; note = Uracil
  modified_base 72: mod_base = OTHER; note = Uracil
  modified_base 78: mod_base = OTHER; note = Uracil
ggaggagctacgatgcggacggaggatagttgctaatcgagccctgctgacgcttcagacagacgactcgctgaggatccgaca

SEQ ID NO: 212 - DNA, 87 bp, synthetic construct
  misc_feature 1..87: note = Synthetic Polynucleotide
  source 1..87: mol_type = other DNA
  modified_base 9: mod_base = OTHER; note = Uracil
  modified_base 14: mod_base = OTHER; note = Uracil
  modified_base 19: mod_base = OTHER; note = Uracil
  modified_base 21: mod_base = OTHER; note = Uracil
  modified_base 26: mod_base = OTHER; note = Uracil
  modified_base 29..30: mod_base = OTHER; note = Uracil
  modified_base 34..36: mod_base = OTHER; note = Uracil
  modified_base 38: mod_base = OTHER; note = Uracil
  modified_base 40..41: mod_base = OTHER; note = Uracil
  modified_base 43: mod_base = OTHER; note = Uracil
  modified_base 54: mod_base = OTHER; note = Uracil
  modified_base 56: mod_base = OTHER; note = Uracil
  modified_base 71: mod_base = OTHER; note = Uracil
  modified_base 75: mod_base = OTHER; note = Uracil
  modified_base 81: mod_base = OTHER; note = Uracil
ggaggagctacgatgcggtgtacactgattgcctttgtgttatgggcgacagatctgccagacagacgactcgctgaggatccgaca

SEQ ID NO: 213 - DNA, 85 bp, synthetic construct
  misc_feature 1..85: note = Synthetic Polynucleotide
  source 1..85: mol_type = other DNA
  modified_base 9: mod_base = OTHER; note = Uracil
  modified_base 14: mod_base = OTHER; note = Uracil
  modified_base 19: mod_base = OTHER; note = Uracil
  modified_base 23: mod_base = OTHER; note = Uracil
  modified_base 26..27: mod_base = OTHER; note = Uracil
  modified_base 35..37: mod_base = OTHER; note = Uracil
  modified_base 39: mod_base = OTHER; note = Uracil
  modified_base 42: mod_base = OTHER; note = Uracil
  modified_base 44..45: mod_base = OTHER; note = Uracil
  modified_base 54: mod_base = OTHER; note = Uracil
  modified_base 57: mod_base = OTHER; note = Uracil
  modified_base 69: mod_base = OTHER; note = Uracil
  modified_base 73: mod_base = OTHER; note = Uracil
  modified_base 79: mod_base = OTHER; note = Uracil
ggaggagctacgatgcggtgaatccttccggcactttgtcatcttcacccccatgctgcacagacgactcgctgaggatccgaca

SEQ ID NO: 214 - DNA, 85 bp, synthetic construct
  misc_feature 1..85: note = Synthetic Polynucleotide
  source 1..85: mol_type = other DNA
  modified_base 9: mod_base = OTHER; note = Uracil
  modified_base 14: mod_base = OTHER; note = Uracil
  modified_base 19: mod_base = OTHER; note = Uracil
  modified_base 23..24: mod_base = OTHER; note = Uracil
  modified_base 26..27: mod_base = OTHER; note = Uracil
  modified_base 35..37: mod_base = OTHER; note = Uracil
  modified_base 42: mod_base = OTHER; note = Uracil
  modified_base 44..45: mod_base = OTHER; note = Uracil
  modified_base 57: mod_base = OTHER; note = Uracil
  modified_base 54: mod_base = OTHER; note = Uracil
  modified_base 69: mod_base = OTHER; note = Uracil
  modified_base 73: mod_base = OTHER; note = Uracil
  modified_base 79: mod_base = OTHER; note = Uracil
ggaggagctacgatgcggtgaattcttccggcactttgccatcttcacccccatgctgcacagacgactcgctgaggatccgaca

SEQ ID NO: 215 - DNA, 86 bp, synthetic construct
  misc_feature 1..86: note = Synthetic Polynucleotide
  source 1..86: mol_type = other DNA
  modified_base 9: mod_base = OTHER; note = Uracil
  modified_base 14: mod_base = OTHER; note = Uracil
  modified_base 22: mod_base = OTHER; note = Uracil
  modified_base 25..28: mod_base = OTHER; note = Uracil
  modified_base 31: mod_base = OTHER; note = Uracil
  modified_base 33: mod_base = OTHER; note = Uracil
  modified_base 35: mod_base = OTHER; note = Uracil
  modified_base 43..44: mod_base = OTHER; note = Uracil
  modified_base 50..52: mod_base = OTHER; note = Uracil
  modified_base 54: mod_base = OTHER; note = Uracil
  modified_base 58: mod_base = OTHER; note = Uracil
  modified_base 61: mod_base = OTHER; note = Uracil
  modified_base 70: mod_base = OTHER; note = Uracil
  modified_base 74: mod_base = OTHER; note = Uracil
  modified_base 80: mod_base = OTHER; note = Uracil
ggaggagctacgatgcggacctcgttttcctctgtaccccacttccccatttctccctgctcagacgactcgctgaggatccgaca

SEQ ID NO: 216 - DNA, 85 bp, synthetic construct
  misc_feature 1..85: note = Synthetic Polynucleotide
  source 1..85: mol_type = other DNA
  modified_base 9: mod_base = OTHER; note = Uracil
  modified_base 14: mod_base = OTHER; note = Uracil
  modified_base 22: mod_base = OTHER; note = Uracil
  modified_base 24: mod_base = OTHER; note = Uracil
  modified_base 28: mod_base = OTHER; note = Uracil
  modified_base 30: mod_base = OTHER; note = Uracil
  modified_base 33: mod_base = OTHER; note = Uracil
  modified_base 38: mod_base = OTHER; note = Uracil
  modified_base 49: mod_base = OTHER; note = Uracil
  modified_base 51: mod_base = OTHER; note = Uracil
  modified_base 53: mod_base = OTHER; note = Uracil
  modified_base 57: mod_base = OTHER; note = Uracil
  modified_base 69: mod_base = OTHER; note = Uracil
  modified_base 73: mod_base = OTHER; note = Uracil
  modified_base 79: mod_base = OTHER; note = Uracil
ggaggagctacgatgcggccgtctcgctctcatcccatgcacgaaacctctctaactgcacagacgactcgctgaggatccgaca

SEQ ID NO: 217 - DNA, 85 bp, synthetic construct
  misc_feature 1..85: note = Synthetic Polynucleotide
  source 1..85: mol_type = other DNA
  modified_base 9: mod_base = OTHER; note = Uracil
  modified_base 14: mod_base = OTHER; note = Uracil
  modified_base 22: mod_base = OTHER; note = Uracil
  modified_base 24: mod_base = OTHER; note = Uracil
  modified_base 28: mod_base = OTHER; note = Uracil
  modified_base 30: mod_base = OTHER; note = Uracil
  modified_base 33: mod_base = OTHER; note = Uracil
  modified_base 38: mod_base = OTHER; note = Uracil
  modified_base 49: mod_base = OTHER; note = Uracil
  modified_base 53: mod_base = OTHER; note = Uracil
  modified_base 57: mod_base = OTHER; note = Uracil
  modified_base 69: mod_base = OTHER; note = Uracil
  modified_base 73: mod_base = OTHER; note = Uracil
  modified_base 79: mod_base = OTHER; note = Uracil
ggaggagctacgatgcggccgtctcgctctcatcccatgcacgaaacctccctcactgcacagacgactcgctgaggatccgaca

SEQ ID NO: 218 - DNA, 85 bp, synthetic construct
  misc_feature 1..85: note = Synthetic Polynucleotide
  source 1..85: mol_type = other DNA
  modified_base 9: mod_base = OTHER; note = Uracil
  modified_base 14: mod_base = OTHER; note = Uracil
  modified_base 22: mod_base = OTHER; note = Uracil
  modified_base 24: mod_base = OTHER; note = Uracil
  modified_base 28: mod_base = OTHER; note = Uracil
  modified_base 30: mod_base = OTHER; note = Uracil
  modified_base 33: mod_base = OTHER; note = Uracil
  modified_base 38: mod_base = OTHER; note = Uracil
  modified_base 49: mod_base = OTHER; note = Uracil
  modified_base 51: mod_base = OTHER; note = Uracil
  modified_base 53: mod_base = OTHER; note = Uracil
  modified_base 69: mod_base = OTHER; note = Uracil
  modified_base 73: mod_base = OTHER; note = Uracil
  modified_base 79: mod_base = OTHER; note = Uracil
ggaggagctacgatgcggccgtctcgctctcatcccatgcacgaaacctctctcaccgcacagacgactcgctgaggatccgaca

SEQ ID NO: 219 - DNA, 86 bp, synthetic construct
  misc_feature 1..86: note = Synthetic Polynucleotide
  source 1..86: mol_type = other DNA
  modified_base 9: mod_base = OTHER; note = Uracil
  modified_base 14: mod_base = OTHER; note = Uracil
  modified_base 23: mod_base = OTHER; note = Uracil
  modified_base 27: mod_base = OTHER; note = Uracil
  modified_base 34: mod_base = OTHER; note = Uracil
  modified_base 36: mod_base = OTHER; note = Uracil
  modified_base 47: mod_base = OTHER; note = Uracil
  modified_base 50..51: mod_base = OTHER; note = Uracil
  modified_base 53..55: mod_base = OTHER; note = Uracil
  modified_base 61: mod_base = OTHER; note = Uracil
  modified_base 70: mod_base = OTHER; note = Uracil
  modified_base 74: mod_base = OTHER; note = Uracil
  modified_base 80: mod_base = OTHER; note = Uracil
ggaggagctacgatgcggcccatcactcccgcgtatcgcgaacgcatcgttatttagccgtcagacgactcgctgaggatccgaca

SEQ ID NO: 220 - DNA, 88 bp, synthetic construct
  misc_feature 1..88: note = Synthetic Polynucleotide
  source 1..88: mol_type = other DNA
  modified_base 9: mod_base = OTHER; note = Uracil
  modified_base 14: mod_base = OTHER; note = Uracil
  modified_base 23..27: mod_base = OTHER; note = Uracil
  modified_base 30: mod_base = OTHER; note = Uracil
  modified_base 33: mod_base = OTHER; note = Uracil
  modified_base 36: mod_base = OTHER; note = Uracil
  modified_base 40: mod_base = OTHER; note = Uracil
  modified_base 45: mod_base = OTHER; note = Uracil
  modified_base 50..51: mod_base = OTHER; note = Uracil
  modified_base 56..57: mod_base = OTHER; note = Uracil
  modified_base 63: mod_base = OTHER; note = Uracil
  modified_base 72: mod_base = OTHER; note = Uracil
  modified_base 76: mod_base = OTHER; note = Uracil
  modified_base 82: mod_base = OTHER; note = Uracil
ggaggagctacgatgcggccgatttttcgtcatcctccataccatcgccttaccgttccgcgtcagacgactcgctgaggatccgaca

SEQ ID NO: 221 - DNA, 85 bp, synthetic construct
  misc_feature 1..85: note = Synthetic Polynucleotide
  source 1..85: mol_type = other DNA
  modified_base 9: mod_base = OTHER; note = Uracil
  modified_base 14: mod_base = OTHER; note = Uracil
  modified_base 22: mod_base = OTHER; note = Uracil
  modified_base 24: mod_base = OTHER; note = Uracil
  modified_base 28: mod_base = OTHER; note = Uracil
  modified_base 30: mod_base = OTHER; note = Uracil
  modified_base 33: mod_base = OTHER; note = Uracil
  modified_base 38: mod_base = OTHER; note = Uracil
  modified_base 51: mod_base = OTHER; note = Uracil
  modified_base 53: mod_base = OTHER; note = Uracil
  modified_base 57: mod_base = OTHER; note = Uracil
  modified_base 69: mod_base = OTHER; note = Uracil
  modified_base 73: mod_base = OTHER; note = Uracil
  modified_base 79: mod_base = OTHER; note = Uracil
ggaggagctacgatgcggccgtctcgctctcatcccatgcacgaaacccctctcactgcacagacgactcgctgaggatccgaca

SEQ ID NO: 222 - DNA, 86 bp, synthetic construct
  misc_feature 1..86: note = Synthetic Polynucleotide
  source 1..86: mol_type = other DNA
  modified_base 9: mod_base = OTHER; note = Uracil
  modified_base 14: mod_base = OTHER; note = Uracil
  modified_base 23..25: mod_base = OTHER; note = Uracil
  modified_base 28: mod_base = OTHER; note = Uracil
  modified_base 31: mod_base = OTHER; note = Uracil
  modified_base 34: mod_base = OTHER; note = Uracil
  modified_base 38: mod_base = OTHER; note = Uracil
  modified_base 43: mod_base = OTHER; note = Uracil
  modified_base 48..49: mod_base = OTHER; note = Uracil
  modified_base 54..55: mod_base = OTHER; note = Uracil
  modified_base 61: mod_base = OTHER; note = Uracil
  modified_base 70: mod_base = OTHER; note = Uracil
  modified_base 74: mod_base = OTHER; note = Uracil
  modified_base 80: mod_base = OTHER; note = Uracil
ggaggagctacgatgcggcagatttcgtcatcatccataccatcgccttaccgttccgcgtcagacgactcgctgaggatccgaca

SEQ ID NO: 223 - DNA, 86 bp, synthetic construct
  misc_feature 1..86: note = Synthetic Polynucleotide
  source 1..86: mol_type = other DNA
  modified_base 9: mod_base = OTHER; note = Uracil
  modified_base 14: mod_base = OTHER; note = Uracil
  modified_base 23: mod_base = OTHER; note = Uracil
  modified_base 27: mod_base = OTHER; note = Uracil
  modified_base 37: mod_base = OTHER; note = Uracil
  modified_base 47: mod_base = OTHER; note = Uracil
  modified_base 50..51: mod_base = OTHER; note = Uracil
  modified_base 53..55: mod_base = OTHER; note = Uracil
  modified_base 61: mod_base = OTHER; note = Uracil
  modified_base 70: mod_base = OTHER; note = Uracil
  modified_base 74: mod_base = OTHER; note = Uracil
  modified_base 80: mod_base = OTHER; note = Uracil
ggaggagctacgatgcggcccatcactcccgcgcactgcgaacgcatcgttatttagccgtcagacgactcgctgaggatccgaca

SEQ ID NO: 224 - DNA, 86 bp, synthetic construct
  misc_feature 1..86: note = Synthetic Polynucleotide
  source 1..86: mol_type = other DNA
  modified_base 9: mod_base = OTHER; note = Uracil
  modified_base 14: mod_base = OTHER; note = Uracil
  modified_base 23: mod_base = OTHER; note = Uracil
  modified_base 27: mod_base = OTHER; note = Uracil
  modified_base 34: mod_base = OTHER; note = Uracil
  modified_base 36..37: mod_base = OTHER; note = Uracil
  modified_base 47: mod_base = OTHER; note = Uracil
  modified_base 50..51: mod_base = OTHER; note = Uracil
  modified_base 53..55: mod_base = OTHER; note = Uracil
  modified_base 61: mod_base = OTHER; note = Uracil
  modified_base 70: mod_base = OTHER; note = Uracil
  modified_base 74: mod_base = OTHER; note = Uracil
  modified_base 80: mod_base = OTHER; note = Uracil
ggaggagctacgatgcggcccatccctcccgcgtattgcgaacgcctcgttatttagccgtcagacgactcgctgaggatccgaca

SEQ ID NO: 225 - DNA, 87 bp, synthetic construct
  misc_feature 1..87: note = Synthetic Polynucleotide
  source 1..87: mol_type = other DNA
  modified_base 9: mod_base = OTHER; note = Uracil
  modified_base 14: mod_base = OTHER; note = Uracil
  modified_base 21: mod_base = OTHER; note = Uracil
  modified_base 23: mod_base = OTHER; note = Uracil
  modified_base 34..35: mod_base = OTHER; note = Uracil
  modified_base 38: mod_base = OTHER; note = Uracil
  modified_base 42: mod_base = OTHER; note = Uracil
  modified_base 47: mod_base = OTHER; note = Uracil
  modified_base 53: mod_base = OTHER; note = Uracil
  modified_base 55: mod_base = OTHER; note = Uracil
  modified_base 62: mod_base = OTHER; note = Uracil
  modified_base 71: mod_base = OTHER; note = Uracil
  modified_base 75: mod_base = OTHER; note = Uracil
  modified_base 81: mod_base = OTHER; note = Uracil
ggaggagctacgatgcggaatctcccgaacgcattagtcagtcccatacccgtgtgccgcgtcagacgactcgctgaggatccgaca

SEQ ID NO: 226 - DNA, 86 bp, synthetic construct
  misc_feature 1..86: note = Synthetic Polynucleotide
  source 1..86: mol_type = other DNA
  modified_base 9: mod_base = OTHER; note = Uracil
  modified_base 14: mod_base = OTHER; note = Uracil
  modified_base 23: mod_base = OTHER; note = Uracil
  modified_base 27: mod_base = OTHER; note = Uracil
  modified_base 32: mod_base = OTHER; note = Uracil
  modified_base 34: mod_base = OTHER; note = Uracil
  modified_base 36..37: mod_base = OTHER; note = Uracil
  modified_base 47: mod_base = OTHER; note = Uracil
  modified_base 50..51: mod_base = OTHER; note = Uracil
  modified_base 53..55: mod_base = OTHER; note = Uracil
  modified_base 61: mod_base = OTHER; note = Uracil
  modified_base 70: mod_base = OTHER; note = Uracil
  modified_base 74: mod_base = OTHER; note = Uracil
  modified_base 80: mod_base = OTHER; note = Uracil
ggaggagctacgatgcggcccatcactcccgtgtattgcgaacgcatcgttatttagccgtcagacgactcgctgaggatccgaca

SEQ ID NO: 227 - DNA, 85 bp, synthetic construct
  misc_feature 1..85: note = Synthetic Polynucleotide
  source 1..85: mol_type = other DNA
  modified_base 9: mod_base = OTHER; note = Uracil
  modified_base 14: mod_base = OTHER; note = Uracil
  modified_base 23..25: mod_base = OTHER; note = Uracil
  modified_base 28: mod_base = OTHER; note = Uracil
  modified_base 31: mod_base = OTHER; note = Uracil
  modified_base 34: mod_base = OTHER; note = Uracil
  modified_base 42: mod_base = OTHER; note = Uracil
  modified_base 47..48: mod_base = OTHER; note = Uracil
  modified_base 53..54: mod_base = OTHER; note = Uracil
  modified_base 60: mod_base = OTHER; note = Uracil
  modified_base 69: mod_base = OTHER; note = Uracil
  modified_base 73: mod_base = OTHER; note = Uracil
  modified_base 79: mod_base = OTHER; note = Uracil
ggaggagctacgatgcggccgatttcgtcatcctccaaccatcgccttaccgttccgcgtcagacgactcgctgaggatccgaca

SEQ ID NO: 228 - DNA, 86 bp, synthetic construct
  misc_feature 1..86: note = Synthetic Polynucleotide
  source 1..86: mol_type = other DNA
  modified_base 9: mod_base = OTHER; note = Uracil
  modified_base 14: mod_base = OTHER; note = Uracil
  modified_base 23: mod_base = OTHER; note = Uracil
  modified_base 27: mod_base = OTHER; note = Uracil
  modified_base 34: mod_base = OTHER; note = Uracil
  modified_base 36..37: mod_base = OTHER; note = Uracil
  modified_base 47: mod_base = OTHER; note = Uracil
  modified_base 50..51: mod_base = OTHER; note = Uracil
  modified_base 53: mod_base = OTHER; note = Uracil
  modified_base 55: mod_base = OTHER; note = Uracil
  modified_base 61: mod_base = OTHER; note = Uracil
  modified_base 70: mod_base = OTHER; note = Uracil
  modified_base 74: mod_base = OTHER; note = Uracil
  modified_base 80: mod_base = OTHER; note = Uracil
ggaggagctacgatgcggcccatcactcccgcgtattgcgaacgcatcgttatctagccgtcagacgactcgctgaggatccgaca

SEQ ID NO: 229 - DNA, 86 bp, synthetic construct
  misc_feature 1..86: note = Synthetic Polynucleotide
  source 1..86: mol_type = other DNA
  modified_base 9: mod_base = OTHER; note = Uracil
  modified_base 14: mod_base = OTHER; note = Uracil
  modified_base 23..25: mod_base = OTHER; note = Uracil
  modified_base 28: mod_base = OTHER; note = Uracil
  modified_base 31: mod_base = OTHER; note = Uracil
  modified_base 34: mod_base = OTHER; note = Uracil
  modified_base 38: mod_base = OTHER; note = Uracil
  modified_base 43: mod_base = OTHER; note = Uracil
  modified_base 48..49: mod_base = OTHER; note = Uracil
  modified_base 54..55: mod_base = OTHER; note = Uracil
  modified_base 61: mod_base = OTHER; note = Uracil
  modified_base 70: mod_base = OTHER; note = Uracil
  modified_base 74: mod_base = OTHER; note = Uracil
  modified_base 80: mod_base = OTHER; note = Uracil
ggaggagctacgatgcggacgatttcgtcatcctccataccatcgccttaccgttccgagtcagacgactcgctgaggatccgaca

SEQ ID NO: 230 - DNA, 86 bp, synthetic construct
  misc_feature 1..86: note = Synthetic Polynucleotide
  source 1..86: mol_type = other DNA
  modified_base 9: mod_base = OTHER; note = Uracil
  modified_base 14: mod_base = OTHER; note = Uracil
  modified_base 23: mod_base = OTHER; note = Uracil
  modified_base 27: mod_base = OTHER; note = Uracil
  modified_base 34: mod_base = OTHER; note = Uracil
  modified_base 36..37: mod_base = OTHER; note = Uracil
  modified_base 45: mod_base = OTHER; note = Uracil
  modified_base 47: mod_base = OTHER; note = Uracil
  modified_base 50..51: mod_base = OTHER; note = Uracil
  modified_base 53..55: mod_base = OTHER; note = Uracil
  modified_base 61: mod_base = OTHER; note = Uracil
  modified_base 70: mod_base = OTHER; note = Uracil
  modified_base 74: mod_base = OTHER; note = Uracil
  modified_base 80: mod_base = OTHER; note = Uracil
ggaggagctacgatgcggcccatcactcccgcgtattgcgaacgtatcgttatttagccgtcagacgactcgctgaggatccgaca

SEQ ID NO: 231 - DNA, 87 bp, synthetic construct
  misc_feature 1..87: note = Synthetic Polynucleotide
  source 1..87: mol_type = other DNA
  modified_base 9: mod_base = OTHER; note = Uracil
  modified_base 14: mod_base = OTHER; note = Uracil
  modified_base 20..21: mod_base = OTHER; note = Uracil
  modified_base 28..29: mod_base = OTHER; note = Uracil
  modified_base 42: mod_base = OTHER; note = Uracil
  modified_base 44: mod_base = OTHER; note = Uracil
  modified_base 47: mod_base = OTHER; note = Uracil
  modified_base 50: mod_base = OTHER; note = Uracil
  modified_base 52: mod_base = OTHER; note = Uracil
  modified_base 54..55: mod_base = OTHER; note = Uracil
  modified_base 57: mod_base = OTHER; note = Uracil
  modified_base 71: mod_base = OTHER; note = Uracil
  modified_base 75: mod_base = OTHER; note = Uracil
  modified_base 81: mod_base = OTHER; note = Uracil
ggaggagctacgatgcggattaccaacttgaacgccgagagtgtggtcatgtgttctgcagacagacgactcgctgaggatccgaca

SEQ ID NO: 232 - DNA, 87 bp, synthetic construct
  misc_feature 1..87: note = Synthetic Polynucleotide
  source 1..87: mol_type = other DNA
  modified_base 9: mod_base = OTHER; note = Uracil
  modified_base 14: mod_base = OTHER; note = Uracil
  modified_base 23..26: mod_base = OTHER; note = Uracil
  modified_base 29: mod_base = OTHER; note = Uracil
  modified_base 32: mod_base = OTHER; note = Uracil
  modified_base 35: mod_base = OTHER; note = Uracil
  modified_base 39: mod_base = OTHER; note = Uracil
  modified_base 44: mod_base = OTHER; note = Uracil
  modified_base 49..50: mod_base = OTHER; note = Uracil
  modified_base 55..56: mod_base = OTHER; note = Uracil
  modified_base 62: mod_base = OTHER; note = Uracil
  modified_base 71: mod_base = OTHER; note = Uracil
  modified_base 75: mod_base = OTHER; note = Uracil
  modified_base 81: mod_base = OTHER; note = Uracil
ggaggagctacgatgcggccgattttcgtcatcctccatgccatcgccttaccgttccgcgtcagacgactcgctgaggatccgaca

SEQ ID NO: 233 - DNA, 85 bp, synthetic construct
  misc_feature 1..85: note = Synthetic Polynucleotide
  source 1..85: mol_type = other DNA
  modified_base 9: mod_base = OTHER; note = Uracil
  modified_base 14: mod_base = OTHER; note = Uracil
  modified_base 19: mod_base = OTHER; note = Uracil
  modified_base 23..24: mod_base = OTHER; note = Uracil
  modified_base 26..27: mod_base = OTHER; note = Uracil
  modified_base 35..37: mod_base = OTHER; note = Uracil
  modified_base 39: mod_base = OTHER; note = Uracil
  modified_base 42: mod_base = OTHER; note = Uracil
  modified_base 44..45: mod_base = OTHER; note = Uracil
  modified_base 54: mod_base = OTHER; note = Uracil
  modified_base 57: mod_base = OTHER; note = Uracil
  modified_base 69: mod_base = OTHER; note = Uracil
  modified_base 73: mod_base = OTHER; note = Uracil
  modified_base 79: mod_base = OTHER; note = Uracil
ggaggagctacgatgcggtggattcttccggcactttgtcatcttcacccccatgctgcacagacgactcgctgaggatccgaca

SEQ ID NO: 234 - DNA, 86 bp, synthetic construct
  misc_feature 1..86: note = Synthetic Polynucleotide
  source 1..86: mol_type = other DNA
  modified_base 9: mod_base = OTHER; note = Uracil
  modified_base 14: mod_base = OTHER; note = Uracil
  modified_base 23..25: mod_base = OTHER; note = Uracil
  modified_base 28: mod_base = OTHER; note = Uracil
  modified_base 31: mod_base = OTHER; note = Uracil
  modified_base 34: mod_base = OTHER; note = Uracil
  modified_base 43: mod_base = OTHER; note = Uracil
  modified_base 48..49: mod_base = OTHER; note = Uracil
  modified_base 54..55: mod_base = OTHER; note = Uracil
  modified_base 61: mod_base = OTHER; note = Uracil
  modified_base 70: mod_base = OTHER; note = Uracil
  modified_base 74: mod_base = OTHER; note = Uracil
  modified_base 80: mod_base = OTHER; note = Uracil
ggaggagctacgatgcggccgatttcgtcatcctccacaccatcgccttacccttccgcgtcagacgactcgctgaggatccgaca

SEQ ID NO: 235 - DNA, 86 bp, synthetic construct
  misc_feature 1..86: note = Synthetic Polynucleotide
  source 1..86: mol_type = other DNA
  modified_base 9: mod_base = OTHER; note = Uracil
  modified_base 14: mod_base = OTHER; note = Uracil
  modified_base 23..25: mod_base = OTHER; note = Uracil
  modified_base 28: mod_base = OTHER; note = Uracil
  modified_base 31: mod_base = OTHER; note = Uracil
  modified_base 34: mod_base = OTHER; note = Uracil
  modified_base 38: mod_base = OTHER; note = Uracil
  modified_base 43: mod_base = OTHER; note = Uracil
  modified_base 46: mod_base = OTHER; note = Uracil
  modified_base 48..49: mod_base = OTHER; note = Uracil
  modified_base 54..55: mod_base = OTHER; note = Uracil
  modified_base 57: mod_base = OTHER; note = Uracil
  modified_base 61: mod_base = OTHER; note = Uracil
  modified_base 70: mod_base = OTHER; note = Uracil
  modified_base 74: mod_base = OTHER; note = Uracil
  modified_base 80: mod_base = OTHER; note = Uracil
ggaggagctacgatgcggccgatttcgtcatcctccataccatcgtcttaccgttctgcgtcagacgactcgctgaggatccgaca

SEQ ID NO: 236 - DNA, 86 bp, synthetic construct
  misc_feature 1..86: note = Synthetic Polynucleotide
  source 1..86: mol_type = other DNA
  modified_base 9: mod_base = OTHER; note = Uracil
  modified_base 14: mod_base = OTHER; note = Uracil
  modified_base 19: mod_base = OTHER; note = Uracil
  modified_base 23..24: mod_base = OTHER; note = Uracil
  modified_base 26..27: mod_base = OTHER; note = Uracil
  modified_base 35..37: mod_base = OTHER; note = Uracil
  modified_base 39: mod_base = OTHER; note = Uracil
  modified_base 42: mod_base = OTHER; note = Uracil
  modified_base 44..45: mod_base = OTHER; note = Uracil
  modified_base 55: mod_base = OTHER; note = Uracil
  modified_base 58: mod_base = OTHER; note = Uracil
  modified_base 70: mod_base = OTHER; note = Uracil
  modified_base 74: mod_base = OTHER; note = Uracil
  modified_base 80: mod_base = OTHER; note = Uracil
ggaggagctacgatgcggtgaattcttccggcactttgtcatcttcaccccccatgctgcacagacgactcgctgaggatccgaca

SEQ ID NO: 237 - DNA, 85 bp, synthetic construct
  misc_feature 1..85: note = Synthetic Polynucleotide
  source 1..85: mol_type = other DNA
  modified_base 9: mod_base = OTHER; note = Uracil
  modified_base 14: mod_base = OTHER; note = Uracil
  modified_base 22..23: mod_base = OTHER; note = Uracil
  modified_base 25..28: mod_base = OTHER; note = Uracil
  modified_base 31: mod_base = OTHER; note = Uracil
  modified_base 33: mod_base = OTHER; note = Uracil
  modified_base 35: mod_base = OTHER; note = Uracil
  modified_base 43..44: mod_base = OTHER; note = Uracil
  modified_base 49..51: mod_base = OTHER; note = Uracil
  modified_base 53: mod_base = OTHER; note = Uracil
  modified_base 57: mod_base = OTHER; note = Uracil
  modified_base 60: mod_base = OTHER; note = Uracil
  modified_base 69: mod_base = OTHER; note = Uracil
  modified_base 73: mod_base = OTHER; note = Uracil
  modified_base 79: mod_base = OTHER; note = Uracil
ggaggagctacgatgcggaccttgttttcctctgtaccccacttcccatttctccctgctcagacgactcgctgaggatccgaca

SEQ ID NO: 238 - DNA, 86 bp, synthetic construct
  misc_feature 1..86: note = Synthetic Polynucleotide
  source 1..86: mol_type = other DNA
  modified_base 9: mod_base = OTHER; note = Uracil
  modified_base 14: mod_base = OTHER; note = Uracil
  modified_base 23: mod_base = OTHER; note = Uracil
  modified_base 27: mod_base = OTHER; note = Uracil
  modified_base 34: mod_base = OTHER; note = Uracil
  modified_base 37: mod_base = OTHER; note = Uracil
  modified_base 50..51: mod_base = OTHER; note = Uracil
  modified_base 53..55: mod_base = OTHER; note = Uracil
  modified_base 61: mod_base = OTHER; note = Uracil
  modified_base 70: mod_base = OTHER; note = Uracil
  modified_base 74: mod_base = OTHER; note = Uracil
  modified_base 80: mod_base = OTHER; note = Uracil
ggaggagctacgatgcggcccatcactcccgcgtattgcgagcgcatcgttatttagccgtcagacgactcgctgaggatccgaca

SEQ ID NO: 239 - DNA, 86 bp, synthetic construct
  misc_feature 1..86: note = Synthetic Polynucleotide
  source 1..86: mol_type = other DNA
  modified_base 9: mod_base = OTHER; note = Uracil
  modified_base 14: mod_base = OTHER; note = Uracil
  modified_base 23..25: mod_base = OTHER; note = Uracil
  modified_base 28: mod_base = OTHER; note = Uracil
  modified_base 31: mod_base = OTHER; note = Uracil
  modified_base 34: mod_base = OTHER; note = Uracil
  modified_base 38: mod_base = OTHER; note = Uracil
  modified_base 43: mod_base = OTHER; note = Uracil
  modified_base 48..49: mod_base = OTHER; note = Uracil
  modified_base 54..55: mod_base = OTHER; note = Uracil
  modified_base 70: mod_base = OTHER; note = Uracil
  modified_base 74: mod_base = OTHER; note = Uracil
  modified_base 80: mod_base = OTHER; note = Uracil
ggaggagctacgatgcggccgatttcgtcatcctccataccatcgccttaccgttccgagacagacgactcgctgaggatccgaca

SEQ ID NO: 240 - DNA, 86 bp, synthetic construct
  misc_feature 1..86: note = Synthetic Polynucleotide
  source 1..86: mol_type = other DNA
  modified_base 9: mod_base = OTHER; note = Uracil
  modified_base 14: mod_base = OTHER; note = Uracil
  modified_base 23: mod_base = OTHER; note = Uracil
  modified_base 27: mod_base = OTHER; note = Uracil
  modified_base 36..37: mod_base = OTHER; note = Uracil
  modified_base 47: mod_base = OTHER; note = Uracil
  modified_base 50..51: mod_base = OTHER; note = Uracil
  modified_base 53..55: mod_base = OTHER; note = Uracil
  modified_base 61: mod_base = OTHER; note = Uracil
  modified_base 70: mod_base = OTHER; note = Uracil
  modified_base 74: mod_base = OTHER; note = Uracil
  modified_base 80: mod_base = OTHER; note = Uracil
ggaggagctacgatgcggcccatcactcccgcgaattgcgaacgcatcgttatttagccgtcagacgactcgctgaggatccgaca

SEQ ID NO: 241 - DNA, 85 bp, synthetic construct
  misc_feature 1..85: note = Synthetic Polynucleotide
  source 1..85: mol_type = other DNA
  modified_base 9: mod_base = OTHER; note = Uracil
  modified_base 14: mod_base = OTHER; note = Uracil
  modified_base 22: mod_base = OTHER; note = Uracil
  modified_base 24: mod_base = OTHER; note = Uracil
  modified_base 28: mod_base = OTHER; note = Uracil
  modified_base 33: mod_base = OTHER; note = Uracil
  modified_base 38: mod_base = OTHER; note = Uracil
  modified_base 49: mod_base = OTHER; note = Uracil
  modified_base 51: mod_base = OTHER; note = Uracil
  modified_base 53: mod_base = OTHER; note = Uracil
  modified_base 57: mod_base = OTHER; note = Uracil
  modified_base 69: mod_base = OTHER; note = Uracil
  modified_base 73: mod_base = OTHER; note = Uracil
  modified_base 79: mod_base = OTHER; note = Uracil
ggaggagctacgatgcggccgtctcgctcccatcccatgcacgaaacctctctcactgcacagacgactcgctgaggatccgaca

SEQ ID NO: 242 - DNA, 85 bp, synthetic construct
  misc_feature 1..85: note = Synthetic Polynucleotide
  source 1..85: mol_type = other DNA
  modified_base 9: mod_base = OTHER; note = Uracil
  modified_base 14: mod_base = OTHER; note = Uracil
  modified_base 23: mod_base = OTHER; note = Uracil
  modified_base 27: mod_base = OTHER; note = Uracil
  modified_base 34: mod_base = OTHER; note = Uracil
  modified_base 36: mod_base = OTHER; note = Uracil
  modified_base 47: mod_base = OTHER; note = Uracil
  modified_base 50: mod_base = OTHER; note = Uracil
  modified_base 51: mod_base = OTHER; note = Uracil
  modified_base 60: mod_base = OTHER; note = Uracil
  modified_base 53..54: mod_base = OTHER; note = Uracil
  modified_base 69: mod_base = OTHER; note = Uracil
  modified_base 73: mod_base = OTHER; note = Uracil
  modified_base 79: mod_base = OTHER; note = Uracil
ggaggagctacgatgcggcccatcactcccgcgtattgcgaacgcatcgttattagccgtcagacgactcgctgaggatccgaca

SEQ ID NO: 243 - DNA, 86 bp, synthetic construct
  misc_feature 1..86: note = Synthetic Polynucleotide
  source 1..86: mol_type = other DNA
  modified_base 9: mod_base = OTHER; note = Uracil
  modified_base 14: mod_base = OTHER; note = Uracil
  modified_base 22..23: mod_base = OTHER; note = Uracil
  modified_base 25..28: mod_base = OTHER; note = Uracil
  modified_base 31: mod_base = OTHER; note = Uracil
  modified_base 35: mod_base = OTHER; note = Uracil
  modified_base 43..44: mod_base = OTHER; note = Uracil
  modified_base 50..52: mod_base = OTHER; note = Uracil
  modified_base 54: mod_base = OTHER; note = Uracil
  modified_base 58: mod_base = OTHER; note = Uracil
  modified_base 61: mod_base = OTHER; note = Uracil
  modified_base 70: mod_base = OTHER; note = Uracil
  modified_base 74: mod_base = OTHER; note = Uracil
  modified_base 80: mod_base = OTHER; note = Uracil
ggaggagctacgatgcggaccttgttttcctccgtaccccacttccccatttctccctgctcagacgactcgctgaggatccgaca

SEQ ID NO: 244 - DNA, 86 bp, synthetic construct
  misc_feature 1..86: note = Synthetic Polynucleotide
  source 1..86: mol_type = other DNA
  modified_base 9: mod_base = OTHER; note = Uracil
  modified_base 14: mod_base = OTHER; note = Uracil
  modified_base 20: mod_base = OTHER; note = Uracil
  modified_base 23..25: mod_base = OTHER; note = Uracil
  modified_base 28: mod_base = OTHER; note = Uracil
  modified_base 31: mod_base = OTHER; note = Uracil
  modified_base 38: mod_base = OTHER; note = Uracil
  modified_base 43: mod_base = OTHER; note = Uracil
  modified_base 48..49: mod_base = OTHER; note = Uracil
  modified_base 54..55: mod_base = OTHER; note = Uracil
  modified_base 61: mod_base = OTHER; note = Uracil
  modified_base 70: mod_base = OTHER; note = Uracil
  modified_base 74: mod_base = OTHER; note = Uracil
  modified_base 80: mod_base = OTHER; note = Uracil
ggaggagctacgatgcggctgatttcgtcatcccccataccatcgccttaccgttccgcgtcagacgactcgctgaggatccgaca

SEQ ID NO: 245 - DNA, 85 bp, synthetic construct
  misc_feature 1..85: note = Synthetic Polynucleotide
  source 1..85: mol_type = other DNA
  modified_base 9: mod_base = OTHER; note = Uracil
  modified_base 14: mod_base = OTHER; note = Uracil
  modified_base 19: mod_base = OTHER; note = Uracil
  modified_base 23..24: mod_base = OTHER; note = Uracil
  modified_base 26..27: mod_base = OTHER; note = Uracil
  modified_base 35..37: mod_base = OTHER; note = Uracil
  modified_base 39: mod_base = OTHER; note = Uracil
  modified_base 42: mod_base = OTHER; note = Uracil
  modified_base 44..45: mod_base = OTHER; note = Uracil
  modified_base 54: mod_base = OTHER; note = Uracil
  modified_base 69: mod_base = OTHER; note = Uracil
  modified_base 73: mod_base = OTHER; note = Uracil
  modified_base 79: mod_base = OTHER; note = Uracil
ggaggagctacgatgcggtgaattcttccggcactttgtcatcttcacccccatgcggcacagacgactcgctgaggatccgaca

SEQ ID NO: 246 - DNA, 84 bp, synthetic construct
  misc_feature 1..84: note = Synthetic Polynucleotide
  source 1..84: mol_type = other DNA
  modified_base 9: mod_base = OTHER; note = Uracil
  modified_base 14: mod_base = OTHER; note = Uracil
  modified_base 27: mod_base = OTHER; note = Uracil
  modified_base 37: mod_base = OTHER; note = Uracil
  modified_base 30: mod_base = OTHER; note = Uracil
  modified_base 45: mod_base = OTHER; note = Uracil
  modified_base 54: mod_base = OTHER; note = Uracil
  modified_base 68: mod_base = OTHER; note = Uracil
  modified_base 72: mod_base = OTHER; note = Uracil
  modified_base 78: mod_base = OTHER; note = Uracil
  modified_base 31: mod_base = OTHER; note = Uracil
  modified_base 34: mod_base = OTHER; note = Uracil
ggaggagctacgatgcggacggaggatagttgctaatcgagccctgcggacgcttcagacagacgactcgctgaggatccgaca

SEQ ID NO: 247 - DNA, 85 bp, synthetic construct
  misc_feature 1..85: note = Synthetic Polynucleotide
  source 1..85: mol_type = other DNA
  modified_base 9: mod_base = OTHER; note = Uracil
  modified_base 14: mod_base = OTHER; note = Uracil
  modified_base 19: mod_base = OTHER; note = Uracil
  modified_base 23..24: mod_base = OTHER; note = Uracil
  modified_base 26..27: mod_base = OTHER; note = Uracil
  modified_base 35..37: mod_base = OTHER; note = Uracil
  modified_base 39: mod_base = OTHER; note = Uracil
  modified_base 42: mod_base = OTHER; note = Uracil
  modified_base 44..45: mod_base = OTHER; note = Uracil
  modified_base 57: mod_base = OTHER; note = Uracil
  modified_base 69: mod_base = OTHER; note = Uracil
  modified_base 73: mod_base = OTHER; note = Uracil
  modified_base 79: mod_base = OTHER; note = Uracil
ggaggagctacgatgcggtgaattcttccggcactttgtcatcttcacccccaggctgcacagacgactcgctgaggatccgaca

SEQ ID NO: 248 - DNA, 85 bp, synthetic construct
  misc_feature 1..85: note = Synthetic Polynucleotide
  source 1..85: mol_type = other DNA
  modified_base 9: mod_base = OTHER; note = Uracil
  modified_base 14: mod_base = OTHER; note = Uracil
  modified_base 23..25: mod_base = OTHER; note = Uracil
  modified_base 28: mod_base = OTHER; note = Uracil
  modified_base 33: mod_base = OTHER; note = Uracil
  modified_base 37: mod_base = OTHER; note = Uracil
  modified_base 42: mod_base = OTHER; note = Uracil
  modified_base 47..48: mod_base = OTHER; note = Uracil
  modified_base 53..54: mod_base = OTHER; note = Uracil
  modified_base 60: mod_base = OTHER; note = Uracil
  modified_base 69: mod_base = OTHER; note = Uracil
  modified_base 73: mod_base = OTHER; note = Uracil
  modified_base 79: mod_base = OTHER; note = Uracil
ggaggagctacgatgcggccgatttcgtatcctccgtaccatcgccttaccgttccgcgtcagacgactcgctgaggatccgaca

SEQ ID NO: 249 - DNA, 85 bp, synthetic construct
  misc_feature 1..85: note = Synthetic Polynucleotide
  source 1..85: mol_type = other DNA
  modified_base 9: mod_base = OTHER; note = Uracil
  modified_base 14: mod_base = OTHER; note = Uracil
  modified_base 22: mod_base = OTHER; note = Uracil
  modified_base 24: mod_base = OTHER; note = Uracil
  modified_base 28: mod_base = OTHER; note = Uracil
  modified_base 30: mod_base = OTHER; note = Uracil
  modified_base 33: mod_base = OTHER; note = Uracil
  modified_base 38: mod_base = OTHER; note = Uracil
  modified_base 49: mod_base = OTHER; note = Uracil
  modified_base 51: mod_base = OTHER; note = Uracil
  modified_base 53: mod_base = OTHER; note = Uracil
  modified_base 57: mod_base = OTHER; note = Uracil
  modified_base 69: mod_base = OTHER; note = Uracil
  modified_base 73: mod_base = OTHER; note = Uracil
  modified_base 79: mod_base = OTHER; note = Uracil
ggaggagctacgatgcggccgtctcgatctcatcccatgcacgaaacctctctcactgcacagacgactcgctgaggatccgaca

SEQ ID NO: 250 - DNA, 84 bp, synthetic construct
  misc_feature 1..84: note = Synthetic Polynucleotide
  source 1..84: mol_type = other DNA
  modified_base 9: mod_base = OTHER; note = Uracil
  modified_base 14: mod_base = OTHER; note = Uracil
  modified_base 23..25: mod_base = OTHER; note = Uracil
  modified_base 28: mod_base = OTHER; note = Uracil
  modified_base 31: mod_base = OTHER; note = Uracil
  modified_base 34: mod_base = OTHER; note = Uracil
  modified_base 38: mod_base = OTHER; note = Uracil
  modified_base 43: mod_base = OTHER; note = Uracil
  modified_base 48: mod_base = OTHER; note = Uracil
  modified_base 52..53: mod_base = OTHER; note = Uracil
  modified_base 59: mod_base = OTHER; note = Uracil
  modified_base 68: mod_base = OTHER; note = Uracil
  modified_base 72: mod_base = OTHER; note = Uracil
  modified_base 78: mod_base = OTHER; note = Uracil
ggaggagctacgatgcggccgatttcgtcatcctccataccatcgcctccgttccgcgtcagacgactcgctgaggatccgaca

SEQ ID NO: 251 - DNA, 82 bp, synthetic construct
  misc_feature 1..82: note = Synthetic Polynucleotide
  source 1..82: mol_type = other DNA
  modified_base 10: mod_base = OTHER; note = Uracil
  modified_base 19: mod_base = OTHER; note = Uracil
  modified_base 20..21: mod_base = OTHER; note = Uracil
  modified_base 24: mod_base = OTHER; note = Uracil
  modified_base 27: mod_base = OTHER; note = Uracil
  modified_base 30: mod_base = OTHER; note = Uracil
  modified_base 34: mod_base = OTHER; note = Uracil
  modified_base 44..45: mod_base = OTHER; note = Uracil
  modified_base 39: mod_base = OTHER; note = Uracil
  modified_base 50..51: mod_base = OTHER; note = Uracil
  modified_base 57: mod_base = OTHER; note = Uracil
  modified_base 66: mod_base = OTHER; note = Uracil
  modified_base 70: mod_base = OTHER; note = Uracil
  modified_base 76: mod_base = OTHER; note = Uracil
ggaggacgatgcggccgatttcgtcatcctccataccatcgccttaccgttccgcgtcagacgactcgctgaggatccgaga

SEQ ID NO: 252 - DNA, 81 bp, synthetic construct
  misc_feature 1..81: note = Synthetic Polynucleotide
  source 1..81: mol_type = other DNA
  modified_base 10: mod_base = OTHER; note = Uracil
  modified_base 15: mod_base = OTHER; note = Uracil
  modified_base 19..20: mod_base = OTHER; note = Uracil
  modified_base 22..23: mod_base = OTHER; note = Uracil
  modified_base 31..33: mod_base = OTHER; note = Uracil
  modified_base 35: mod_base = OTHER; note = Uracil
  modified_base 38: mod_base = OTHER; note = Uracil
  modified_base 40..41: mod_base = OTHER; note = Uracil
  modified_base 50: mod_base = OTHER; note = Uracil
  modified_base 53: mod_base = OTHER; note = Uracil
  modified_base 65: mod_base = OTHER; note = Uracil
  modified_base 69: mod_base = OTHER; note = Uracil
  modified_base 75: mod_base = OTHER; note = Uracil
ggaggacgatgcggtgaattcttccggcactttgtcatcttcacccccatgctgcacagacgactcgctgaggatccgaga

SEQ ID NO: 253 - DNA, 81 bp, synthetic construct
  misc_feature 1..81: note = Synthetic Polynucleotide
  source 1..81: mol_type = other DNA
  modified_base 10: mod_base = OTHER; note = Uracil
  modified_base 18: mod_base = OTHER; note = Uracil
  modified_base 20: mod_base = OTHER; note = Uracil
  modified_base 24: mod_base = OTHER; note = Uracil
  modified_base 26: mod_base = OTHER; note = Uracil
  modified_base 29: mod_base = OTHER; note = Uracil
  modified_base 34: mod_base = OTHER; note = Uracil
  modified_base 45: mod_base = OTHER; note = Uracil
  modified_base 47: mod_base = OTHER; note = Uracil
  modified_base 49: mod_base = OTHER; note = Uracil
  modified_base 53: mod_base = OTHER; note = Uracil
  modified_base 65: mod_base = OTHER; note = Uracil
  modified_base 69: mod_base = OTHER; note = Uracil
  modified_base 75: mod_base = OTHER; note = Uracil
ggaggacgatgcggccgtctcgctctcatcccatgcacgaaacctctctcactgcacagacgactcgctgaggatccgaga

SEQ ID NO: 254 - DNA, 82 bp, synthetic construct
  misc_feature 1..82: note = Synthetic Polynucleotide
  source 1..82: mol_type = other DNA
  modified_base 10: mod_base = OTHER; note = Uracil
  modified_base 19: mod_base = OTHER; note = Uracil
  modified_base 23: mod_base = OTHER; note = Uracil
  modified_base 30: mod_base = OTHER; note = Uracil
  modified_base 32..33: mod_base = OTHER; note = Uracil
  modified_base 43: mod_base = OTHER; note = Uracil
  modified_base 46..47: mod_base = OTHER; note = Uracil
  modified_base 49..51: mod_base = OTHER; note = Uracil
  modified_base 57: mod_base = OTHER; note = Uracil
  modified_base 66: mod_base = OTHER; note = Uracil
  modified_base 70: mod_base = OTHER; note = Uracil
  modified_base 76: mod_base = OTHER; note = Uracil
ggaggacgatgcggcccatcactcccgcgtattgcgaacgcatcgttatttagccgtcagacgactcgctgaggatccgaga

SEQ ID NO: 255 - DNA, 82 bp, synthetic construct
  misc_feature 1..82: note = Synthetic Polynucleotide
  source 1..82: mol_type = other DNA
  modified_base 10: mod_base = OTHER; note = Uracil
  modified_base 18..19: mod_base = OTHER; note = Uracil
  modified_base 21..24: mod_base = OTHER; note = Uracil
  modified_base 27: mod_base = OTHER; note = Uracil
  modified_base 29: mod_base = OTHER; note = Uracil
  modified_base 31: mod_base = OTHER; note = Uracil
  modified_base 39..40: mod_base = OTHER; note = Uracil
  modified_base 46..48: mod_base = OTHER; note = Uracil
  modified_base 50: mod_base = OTHER; note = Uracil
  modified_base 54: mod_base = OTHER; note = Uracil
  modified_base 57: mod_base = OTHER; note = Uracil
  modified_base 66: mod_base = OTHER; note = Uracil
  modified_base 70: mod_base = OTHER; note = Uracil
  modified_base 76: mod_base = OTHER; note = Uracil
ggaggacgatgcggaccttgttttcctctgtaccccacttccccatttctccctgctcagacgactcgctgaggatccgaga

SEQ ID NO: 256 - DNA, 79 bp, synthetic construct
  misc_feature 1..79: note = Synthetic Polynucleotide
  source 1..79: mol_type = other DNA
  modified_base 10: mod_base = OTHER; note = Uracil
  modified_base 15: mod_base = OTHER; note = Uracil
  modified_base 17: mod_base = OTHER; note = Uracil
  modified_base 22: mod_base = OTHER; note = Uracil
  modified_base 25..26: mod_base = OTHER; note = Uracil
  modified_base 30..32: mod_base = OTHER; note = Uracil
  modified_base 34: mod_base = OTHER; note = Uracil
  modified_base 36..37: mod_base = OTHER; note = Uracil
  modified_base 39: mod_base = OTHER; note = Uracil
  modified_base 50: mod_base = OTHER; note = Uracil
  modified_base 52: mod_base = OTHER; note = Uracil
  modified_base 63: mod_base = OTHER; note = Uracil
  modified_base 67: mod_base = OTHER; note = Uracil
  modified_base 73: mod_base = OTHER; note = Uracil
ggaggacgatgcggtgtacactgattgcctttgtgttatgagcgacagatctgccagacgactcgctgaggatccgaga

SEQ ID NO: 257 - DNA, 79 bp, synthetic construct
  misc_feature 1..79: note = Synthetic Polynucleotide
  source 1..79: mol_type = other DNA
  modified_base 10: mod_base = OTHER; note = Uracil
  modified_base 26..27: mod_base = OTHER; note = Uracil
  modified_base 30: mod_base = OTHER; note = Uracil
  modified_base 36..37: mod_base = OTHER; note = Uracil
  modified_base 40: mod_base = OTHER; note = Uracil
  modified_base 44: mod_base = OTHER; note = Uracil
  modified_base 51: mod_base = OTHER; note = Uracil
  modified_base 54: mod_base = OTHER; note = Uracil
  modified_base 63: mod_base = OTHER; note = Uracil
  modified_base 67: mod_base = OTHER; note = Uracil
  modified_base 73: mod_base = OTHER; note = Uracil
ggaggacgatgcggggaagcaacacttagtcgcgattgatacgtgcgcagtcatcagacgactcgctgaggatccgaga

SEQ ID NO: 258 - DNA, 79 bp, synthetic construct
  misc_feature 1..79: note = Synthetic Polynucleotide
  source 1..79: mol_type = other DNA
  modified_base 10: mod_base = OTHER; note = Uracil
  modified_base 19..22: mod_base = OTHER; note = Uracil
  modified_base 25: mod_base = OTHER; note = Uracil
  modified_base 28: mod_base = OTHER; note = Uracil
  modified_base 31: mod_base = OTHER; note = Uracil
  modified_base 35: mod_base = OTHER; note = Uracil
  modified_base 40: mod_base = OTHER; note = Uracil
  modified_base 45..46: mod_base = OTHER; note = Uracil
  modified_base 51..52: mod_base = OTHER; note = Uracil
  modified_base 63: mod_base = OTHER; note = Uracil
  modified_base 67: mod_base = OTHER; note = Uracil
  modified_base 73: mod_base = OTHER; note = Uracil
ggaggacgatgcggccgattttcgtcatcctccataccatcgccttaccgttcccagacgactcgctgaggatccgaga

SEQ ID NO: 259 - DNA, 79 bp, synthetic construct
  misc_feature 1..79: note = Synthetic Polynucleotide
  source 1..79: mol_type = other DNA
  modified_base 10: mod_base = OTHER; note = Uracil
  modified_base 15: mod_base = OTHER; note = Uracil
  modified_base 18..19: mod_base = OTHER; note = Uracil
  modified_base 21: mod_base = OTHER; note = Uracil
  modified_base 29: mod_base = OTHER; note = Uracil
  modified_base 41: mod_base = OTHER; note = Uracil
  modified_base 43: mod_base = OTHER; note = Uracil
  modified_base 47..48: mod_base = OTHER; note = Uracil
  modified_base 50..51: mod_base = OTHER; note = Uracil
  modified_base 63: mod_base = OTHER; note = Uracil
  modified_base 67: mod_base = OTHER; note = Uracil
  modified_base 73: mod_base = OTHER; note = Uracil
ggaggacgatgcggtaattctcaggaggtgcggaacgggatatggattgttcgccagacgactcgctgaggatccgaga

SEQ ID NO: 260 - DNA, 79 bp, synthetic construct
  misc_feature 1..79: note = Synthetic Polynucleotide
  source 1..79: mol_type = other DNA
  modified_base 10: mod_base = OTHER; note = Uracil
  modified_base 15: mod_base = OTHER; note = Uracil
  modified_base 20: mod_base = OTHER; note = Uracil
  modified_base 24: mod_base = OTHER; note = Uracil
  modified_base 29: mod_base = OTHER; note = Uracil
  modified_base 40: mod_base = OTHER; note = Uracil
  modified_base 46..48: mod_base = OTHER; note = Uracil
  modified_base 50: mod_base = OTHER; note = Uracil
  modified_base 63: mod_base = OTHER; note = Uracil
  modified_base 67: mod_base = OTHER; note = Uracil
  modified_base 73: mod_base = OTHER; note = Uracil
ggaggacgatgcggtacactcagtcacgtagcaccgcagtgaccctttgtaccgcagacgactcgctgaggatccgaga

SEQ ID NO: 261 - DNA, 79 bp, synthetic construct
  misc_feature 1..79: note = Synthetic Polynucleotide
  source 1..79: mol_type = other DNA
  modified_base 10: mod_base = OTHER; note = Uracil
  modified_base 17: mod_base = OTHER; note = Uracil
  modified_base 20: mod_base = OTHER; note = Uracil
  modified_base 30: mod_base = OTHER; note = Uracil
  modified_base 33: mod_base = OTHER; note = Uracil
  modified_base 35: mod_base = OTHER; note = Uracil
  modified_base 37: mod_base = OTHER; note = Uracil
  modified_base 39: mod_base = OTHER; note = Uracil
  modified_base 50: mod_base = OTHER; note = Uracil
  modified_base 63: mod_base = OTHER; note = Uracil
  modified_base 67: mod_base = OTHER; note = Uracil
  modified_base 73: mod_base = OTHER; note = Uracil
ggaggacgatgcggcctagtacaaaagcctgatctctgtgagcagacactagaacagacgactcgctgaggatccgaga

SEQ ID NO: 262 - DNA, 79 bp, synthetic construct
  misc_feature 1..79: note = Synthetic Polynucleotide
  source 1..79: mol_type = other DNA
  modified_base 10: mod_base = OTHER; note = Uracil
  modified_base 16..17: mod_base = OTHER; note = Uracil
  modified_base 24..25: mod_base = OTHER; note = Uracil
  modified_base 38: mod_base = OTHER; note = Uracil
  modified_base 40: mod_base = OTHER; note = Uracil
  modified_base 43: mod_base = OTHER; note = Uracil
  modified_base 48: mod_base = OTHER; note = Uracil
  modified_base 50..51: mod_base = OTHER; note = Uracil
  modified_base 53: mod_base = OTHER; note = Uracil
  modified_base 63: mod_base = OTHER; note = Uracil
  modified_base 67: mod_base = OTHER; note = Uracil
  modified_base 73: mod_base = OTHER; note = Uracil
ggaggacgatgcggattaccaacttgaacgccgagagtgtggtcacgtgttctgcagacgactcgctgaggatccgaga

SEQ ID NO: 263 - DNA, 79 bp, synthetic construct; identical to SEQ ID NO: 257
  misc_feature 1..79: note = Synthetic Polynucleotide
  source 1..79: mol_type = other DNA
  modified_base 10: mod_base = OTHER; note = Uracil
  modified_base 26..27: mod_base = OTHER; note = Uracil
  modified_base 30: mod_base = OTHER; note = Uracil
  modified_base 36..37: mod_base = OTHER; note = Uracil
  modified_base 40: mod_base = OTHER; note = Uracil
  modified_base 44: mod_base = OTHER; note = Uracil
  modified_base 51: mod_base = OTHER; note = Uracil
  modified_base 54: mod_base = OTHER; note = Uracil
  modified_base 63: mod_base = OTHER; note = Uracil
  modified_base 67: mod_base = OTHER; note = Uracil
  modified_base 73: mod_base = OTHER; note = Uracil

SEQ ID NO: 264 - DNA, 79 bp, synthetic construct
  misc_feature 1..79: note = Synthetic Polynucleotide
  source 1..79: mol_type = other DNA
  modified_base 10: mod_base = OTHER; note = Uracil
  modified_base 23: mod_base = OTHER; note = Uracil
  modified_base 26: mod_base = OTHER; note = Uracil
  modified_base 46: mod_base = OTHER; note = Uracil
  modified_base 50: mod_base = OTHER; note = Uracil
  modified_base 52: mod_base = OTHER; note = Uracil
  modified_base 63: mod_base = OTHER; note = Uracil
  modified_base 67: mod_base = OTHER; note = Uracil
  modified_base 73: mod_base = OTHER; note = Uracil
ggaggacgatgcggcaacaaactaatcagacacgagacagagagatagatctgccagacgactcgctgaggatccgaga

SEQ ID NO: 265 - DNA, 79 bp, synthetic construct
  misc_feature 1..79: note = Synthetic Polynucleotide
  source 1..79: mol_type = other DNA
  modified_base 10: mod_base = OTHER; note = Uracil
  modified_base 19: mod_base = OTHER; note = Uracil
  modified_base 26: mod_base = OTHER; note = Uracil
  modified_base 28: mod_base = OTHER; note = Uracil
  modified_base 31: mod_base = OTHER; note = Uracil
  modified_base 35: mod_base = OTHER; note = Uracil
  modified_base 45: mod_base = OTHER; note = Uracil
  modified_base 47: mod_base = OTHER; note = Uracil
  modified_base 50: mod_base = OTHER; note = Uracil
  modified_base 63: mod_base = OTHER; note = Uracil
  modified_base 67: mod_base = OTHER; note = Uracil
  modified_base 73: mod_base = OTHER; note = Uracil
ggaggacgatgcggcaggtgcgggatctaatgcgtagacagccatatactgacacagacgactcgctgaggatccgaga

SEQ ID NO: 266 - DNA, 87 bp, synthetic construct
  misc_feature 1..87: note = Synthetic Polynucleotide
  source 1..87: mol_type = other DNA
  modified_base 9: mod_base = OTHER; note = Uracil
  modified_base 14: mod_base = OTHER; note = Uracil
  modified_base 23: mod_base = OTHER; note = Uracil
  modified_base 30: mod_base = OTHER; note = Uracil
  modified_base 32: mod_base = OTHER; note = Uracil
  modified_base 35: mod_base = OTHER; note = Uracil
  modified_base 39: mod_base = OTHER; note = Uracil
  modified_base 49: mod_base = OTHER; note = Uracil
  modified_base 51: mod_base = OTHER; note = Uracil
  modified_base 54: mod_base = OTHER; note = Uracil
  modified_base 71: mod_base = OTHER; note = Uracil
  modified_base 75: mod_base = OTHER; note = Uracil
  modified_base 81: mod_base = OTHER; note = Uracil
ggaggagctacgatgcggcaggtgcggggtctaatgcgtagacagccatatactgacacagacagacgactcgctgaggatccgaca

SEQ ID NO: 267 - DNA, 87 bp, synthetic construct
  misc_feature 1..87: note = Synthetic Polynucleotide
  source 1..87: mol_type = other DNA
  modified_base 9: mod_base = OTHER; note = Uracil
  modified_base 14: mod_base = OTHER; note = Uracil
  modified_base 30: mod_base = OTHER; note = Uracil
  modified_base 32: mod_base = OTHER; note = Uracil
  modified_base 35: mod_base = OTHER; note = Uracil
  modified_base 39: mod_base = OTHER; note = Uracil
  modified_base 49: mod_base = OTHER; note = Uracil
  modified_base 51: mod_base = OTHER; note = Uracil
  modified_base 54: mod_base = OTHER; note = Uracil
  modified_base 71: mod_base = OTHER; note = Uracil
  modified_base 75: mod_base = OTHER; note = Uracil
  modified_base 81: mod_base = OTHER; note = Uracil
ggaggagctacgatgcggcaggggcggggtctaatgcgtagacagccatatactgacacagacagacgactcgctgaggatccgaca

SEQ ID NO: 268 - DNA, 87 bp, synthetic construct
  misc_feature 1..87: note = Synthetic Polynucleotide
  source 1..87: mol_type = other DNA
  modified_base 9: mod_base = OTHER; note = Uracil
  modified_base 14: mod_base = OTHER; note = Uracil
  modified_base 30..31: mod_base = OTHER; note = Uracil
  modified_base 34: mod_base = OTHER; note = Uracil
  modified_base 40..41: mod_base = OTHER; note = Uracil
  modified_base 44: mod_base = OTHER; note = Uracil
  modified_base 48: mod_base = OTHER; note = Uracil
  modified_base 55: mod_base = OTHER; note = Uracil
  modified_base 58: mod_base = OTHER; note = Uracil
  modified_base 71: mod_base = OTHER; note = Uracil
  modified_base 75: mod_base = OTHER; note = Uracil
  modified_base 81: mod_base = OTHER; note = Uracil
ggaggagctacgatgcggggaagcaacacttagtcgcgattgatgcgtgcgcagtcatcagacagacgactcgctgaggatccgaca

SEQ ID NO: 269 - DNA, 87 bp, synthetic construct
  misc_feature 1..87: note = Synthetic Polynucleotide
  source 1..87: mol_type = other DNA
  modified_base 9: mod_base = OTHER; note = Uracil
  modified_base 14: mod_base = OTHER; note = Uracil
  modified_base 30..31: mod_base = OTHER; note = Uracil
  modified_base 34: mod_base = OTHER; note = Uracil
  modified_base 40..41: mod_base = OTHER; note = Uracil
  modified_base 44: mod_base = OTHER; note = Uracil
  modified_base 46: mod_base = OTHER; note = Uracil
  modified_base 48: mod_base = OTHER; note = Uracil
  modified_base 55: mod_base = OTHER; note = Uracil
  modified_base 58: mod_base = OTHER; note = Uracil
  modified_base 71: mod_base = OTHER; note = Uracil
  modified_base 75: mod_base = OTHER; note = Uracil
  modified_base 81: mod_base = OTHER; note = Uracil
ggaggagctacgatgcggggaagcaacacttagtcgcgattgatatgtgcgcagtcatcagacagacgactcgctgaggatccgaca

SEQ ID NO: 270 - DNA, 87 bp, synthetic construct
  misc_feature 1..87: note = Synthetic Polynucleotide
  source 1..87: mol_type = other DNA
  modified_base 9: mod_base = OTHER; note = Uracil
  modified_base 14: mod_base = OTHER; note = Uracil
  modified_base 30..31: mod_base = OTHER; note = Uracil
  modified_base 34: mod_base = OTHER; note = Uracil
  modified_base 40..41: mod_base = OTHER; note = Uracil
  modified_base 44: mod_base = OTHER; note = Uracil
  modified_base 48: mod_base = OTHER; note = Uracil
  modified_base 52: mod_base = OTHER; note = Uracil
  modified_base 55: mod_base = OTHER; note = Uracil
  modified_base 58: mod_base = OTHER; note = Uracil
  modified_base 71: mod_base = OTHER; note = Uracil
  modified_base 75: mod_base = OTHER; note = Uracil
  modified_base 81: mod_base = OTHER; note = Uracil
ggaggagctacgatgcggggaagcaacacttagtcgcgattgatacgtgcgtagtcatcagacagacgactcgctgaggatccgaca

SEQ ID NO: 271 - DNA, 87 bp, synthetic construct
  misc_feature 1..87: note = Synthetic Polynucleotide
  source 1..87: mol_type = other DNA
  modified_base 9: mod_base = OTHER; note = Uracil
  modified_base 14: mod_base = OTHER; note = Uracil
  modified_base 30..31: mod_base = OTHER; note = Uracil
  modified_base 34: mod_base = OTHER; note = Uracil
  modified_base 40..41: mod_base = OTHER; note = Uracil
  modified_base 48: mod_base = OTHER; note = Uracil
  modified_base 55: mod_base = OTHER; note = Uracil
  modified_base 44: mod_base = OTHER; note = Uracil
  modified_base 58: mod_base = OTHER; note = Uracil
  modified_base 71: mod_base = OTHER; note = Uracil
  modified_base 75: mod_base = OTHER; note = Uracil
  modified_base 81: mod_base = OTHER; note = Uracil
ggaggagctacgatgcggggaagcaacacttagtcgcgattggtacgtgcgcagtcatcagacagacgactcgctgaggatccgaca

SEQ ID NO: 272 - DNA, 87 bp, synthetic construct
  misc_feature 1..87: note = Synthetic Polynucleotide
  source 1..87: mol_type = other DNA
  modified_base 9: mod_base = OTHER; note = Uracil
  modified_base 14: mod_base = OTHER; note = Uracil
  modified_base 30..31: mod_base = OTHER; note = Uracil
  modified_base 34: mod_base = OTHER; note = Uracil
  modified_base 40..41: mod_base = OTHER; note = Uracil
  modified_base 44: mod_base = OTHER; note = Uracil
  modified_base 48: mod_base = OTHER; note = Uracil
  modified_base 55: mod_base = OTHER; note = Uracil
  modified_base 58: mod_base = OTHER; note = Uracil
  modified_base 71: mod_base = OTHER; note = Uracil
  modified_base 75: mod_base = OTHER; note = Uracil
  modified_base 81: mod_base = OTHER; note = Uracil
ggaggagctacgatgcggggaagcaacacttagtcgcgattgatacgtgcgcggtcatcagacagacgactcgctgaggatccgaca

SEQ ID NO: 273 - DNA, 87 bp, synthetic construct
  misc_feature 1..87: note = Synthetic Polynucleotide
  source 1..87: mol_type = other DNA
  modified_base 9: mod_base = OTHER; note = Uracil
  modified_base 14: mod_base = OTHER; note = Uracil
  modified_base 30..31: mod_base = OTHER; note = Uracil
  modified_base 34: mod_base = OTHER; note = Uracil
  modified_base 40..41: mod_base = OTHER; note = Uracil
  modified_base 44: mod_base = OTHER; note = Uracil
  modified_base 48: mod_base = OTHER; note = Uracil
  modified_base 55: mod_base = OTHER; note = Uracil
  modified_base 58: mod_base = OTHER; note = Uracil
  modified_base 71: mod_base = OTHER; note = Uracil
  modified_base 75: mod_base = OTHER; note = Uracil
  modified_base 81: mod_base = OTHER; note = Uracil
ggaggagctacgatgcggggaagcaacgcttagtcgcgattgatacgtgcgcagtcatcagacagacgactcgctgaggatccgaca

SEQ ID NO: 274 - DNA, 87 bp, synthetic construct
  misc_feature 1..87: note = Synthetic Polynucleotide
  source 1..87: mol_type = other DNA
  modified_base 9: mod_base = OTHER; note = Uracil
  modified_base 14: mod_base = OTHER; note = Uracil
  modified_base 19: mod_base = OTHER; note = Uracil
  modified_base 22..23: mod_base = OTHER; note = Uracil
  modified_base 25: mod_base = OTHER; note = Uracil
  modified_base 33: mod_base = OTHER; note = Uracil
  modified_base 45: mod_base = OTHER; note = Uracil
  modified_base 47: mod_base = OTHER; note = Uracil
  modified_base 50..52: mod_base = OTHER; note = Uracil
  modified_base 54..55: mod_base = OTHER; note = Uracil
  modified_base 62: mod_base = OTHER; note = Uracil
  modified_base 71: mod_base = OTHER; note = Uracil
  modified_base 75: mod_base = OTHER; note = Uracil
  modified_base 81: mod_base = OTHER; note = Uracil
ggaggagctacgatgcggtaattctcaggaggtgcggaacgggatatggtttgttcgccagtcagacgactcgctgaggatccgaca

SEQ ID NO: 275 - DNA, 87 bp, synthetic construct
  misc_feature 1..87: note = Synthetic Polynucleotide
  source 1..87: mol_type = other DNA
  modified_base 9: mod_base = OTHER; note = Uracil
  modified_base 14: mod_base = OTHER; note = Uracil
  modified_base 19: mod_base = OTHER; note = Uracil
  modified_base 22..23: mod_base = OTHER; note = Uracil
  modified_base 25: mod_base = OTHER; note = Uracil
  modified_base 33: mod_base = OTHER; note = Uracil
  modified_base 45: mod_base = OTHER; note = Uracil
  modified_base 47: mod_base = OTHER; note = Uracil
  modified_base 51..52: mod_base = OTHER; note = Uracil
  modified_base 54: mod_base = OTHER; note = Uracil
  modified_base 62: mod_base = OTHER; note = Uracil
  modified_base 71: mod_base = OTHER; note = Uracil
  modified_base 75: mod_base = OTHER; note = Uracil
  modified_base 81: mod_base = OTHER; note = Uracil
ggaggagctacgatgcggtaattctcaggaggtgcggaacgggatatggattgtccgccagtcagacgactcgctgaggatccgaca

SEQ ID NO: 276 - DNA, 87 bp, synthetic construct
  misc_feature 1..87: note = Synthetic Polynucleotide
  source 1..87: mol_type = other DNA
  modified_base 9: mod_base = OTHER; note = Uracil
  modified_base 14: mod_base = OTHER; note = Uracil
  modified_base 19: mod_base = OTHER; note = Uracil
  modified_base 22..23: mod_base = OTHER; note = Uracil
  modified_base 25: mod_base = OTHER; note = Uracil
  modified_base 33: mod_base = OTHER; note = Uracil
  modified_base 45: mod_base = OTHER; note = Uracil
  modified_base 47: mod_base = OTHER; note = Uracil
  modified_base 52: mod_base = OTHER; note = Uracil
  modified_base 54..55: mod_base = OTHER; note = Uracil
  modified_base 62: mod_base = OTHER; note = Uracil
  modified_base 71: mod_base = OTHER; note = Uracil
  modified_base 75: mod_base = OTHER; note = Uracil
  modified_base 81: mod_base = OTHER; note = Uracil
ggaggagctacgatgcggtaattctcaggaggtgcggaacgggatatggaatgttcgccagtcagacgactcgctgaggatccgaca

SEQ ID NO: 277 - DNA, 87 bp, synthetic construct
  misc_feature 1..87: note = Synthetic Polynucleotide
  source 1..87: mol_type = other DNA
  modified_base 9: mod_base = OTHER; note = Uracil
  modified_base 14: mod_base = OTHER; note = Uracil
  modified_base 19: mod_base = OTHER; note = Uracil
  modified_base 22..23: mod_base = OTHER; note = Uracil
  modified_base 25: mod_base = OTHER; note = Uracil
  modified_base 33: mod_base = OTHER; note = Uracil
  modified_base 45: mod_base = OTHER; note = Uracil
  modified_base 47: mod_base = OTHER; note = Uracil
  modified_base 51..52: mod_base = OTHER; note = Uracil
  modified_base 54..55: mod_base = OTHER; note = Uracil
  modified_base 62: mod_base = OTHER; note = Uracil
  modified_base 71: mod_base = OTHER; note = Uracil
  modified_base 75: mod_base = OTHER; note = Uracil
  modified_base 81: mod_base = OTHER; note = Uracil
ggaggagctacgatgcggtaattctcaggaggtgcggagcgggatatggattgttcgccagtcagacgactcgctgaggatccgaca

SEQ ID NO: 278 - DNA, 86 bp, synthetic construct
  misc_feature 1..86: note = Synthetic Polynucleotide
  source 1..86: mol_type = other DNA
  modified_base 9: mod_base = OTHER; note = Uracil
  modified_base 14: mod_base = OTHER; note = Uracil
  modified_base 23: mod_base = OTHER; note = Uracil
  modified_base 27: mod_base = OTHER; note = Uracil
  modified_base 34: mod_base = OTHER; note = Uracil
  modified_base 36..37: mod_base = OTHER; note = Uracil
  modified_base 47: mod_base = OTHER; note = Uracil
  modified_base 50..51: mod_base = OTHER; note = Uracil
  modified_base 53..55: mod_base = OTHER; note = Uracil
  modified_base 61: mod_base = OTHER; note = Uracil
  modified_base 70: mod_base = OTHER; note = Uracil
  modified_base 74: mod_base = OTHER; note = Uracil
  modified_base 80: mod_base = OTHER; note = Uracil
ggaggagctacgatgcggaccatcgctcccgcgtattgcgaacgcatcgttatttagccgtcagacgactcgctgaggatccgaca

SEQ ID NO: 279 - DNA, 86 bp, synthetic construct
  misc_feature 1..86: note = Synthetic Polynucleotide
  source 1..86: mol_type = other DNA
  modified_base 9: mod_base = OTHER; note = Uracil
  modified_base 14: mod_base = OTHER; note = Uracil
  modified_base 23: mod_base = OTHER; note = Uracil
  modified_base 27: mod_base = OTHER; note = Uracil
  modified_base 34: mod_base = OTHER; note = Uracil
  modified_base 36..37: mod_base = OTHER; note = Uracil
  modified_base 41: mod_base = OTHER; note = Uracil
  modified_base 47: mod_base = OTHER; note = Uracil
  modified_base 50..51: mod_base = OTHER; note = Uracil
  modified_base 53..55: mod_base = OTHER; note = Uracil
  modified_base 61: mod_base = OTHER; note = Uracil
  modified_base 70: mod_base = OTHER; note = Uracil
  modified_base 74: mod_base = OTHER; note = Uracil
  modified_base 80: mod_base = OTHER; note = Uracil
ggaggagctacgatgcggcccatcactcccgcgtattgcgtacgcatcgttatttagccgtcagacgactcgctgaggatccgaca

SEQ ID NO: 280 - DNA, 87 bp, synthetic construct
  misc_feature 1..87: note = Synthetic Polynucleotide
  source 1..87: mol_type = other DNA
  modified_base 9: mod_base = OTHER; note = Uracil
  modified_base 14: mod_base = OTHER; note = Uracil
  modified_base 29: mod_base = OTHER; note = Uracil
  modified_base 33: mod_base = OTHER; note = Uracil
  modified_base 36: mod_base = OTHER; note = Uracil
  modified_base 38..39: mod_base = OTHER; note = Uracil
  modified_base 43..44: mod_base = OTHER; note = Uracil
  modified_base 48..49: mod_base = OTHER; note = Uracil
  modified_base 55: mod_base = OTHER; note = Uracil
  modified_base 71: mod_base = OTHER; note = Uracil
  modified_base 75: mod_base = OTHER; note = Uracil
  modified_base 81: mod_base = OTHER; note = Uracil
ggaggagctacgatgcggccggaggcagtcactaatcttcacttcccttagacatgcgcagacagacgactcgctgaggatccgaca

SEQ ID NO: 281 - DNA, 87 bp, synthetic construct
  misc_feature 1..87: note = Synthetic Polynucleotide
  source 1..87: mol_type = other DNA
  modified_base 9: mod_base = OTHER; note = Uracil
  modified_base 14: mod_base = OTHER; note = Uracil
  modified_base 30..31: mod_base = OTHER; note = Uracil
  modified_base 34: mod_base = OTHER; note = Uracil
  modified_base 40..41: mod_base = OTHER; note = Uracil
  modified_base 44: mod_base = OTHER; note = Uracil
  modified_base 48: mod_base = OTHER; note = Uracil
  modified_base 50: mod_base = OTHER; note = Uracil
  modified_base 55: mod_base = OTHER; note = Uracil
  modified_base 58: mod_base = OTHER; note = Uracil
  modified_base 71: mod_base = OTHER; note = Uracil
  modified_base 75: mod_base = OTHER; note = Uracil
  modified_base 81: mod_base = OTHER; note = Uracil
ggaggagctacgatgcggggaagcaacacttagtcgcgattgatacgtgtgcagtcatcagacagacgactcgctgaggatccgaca

SEQ ID NO: 282 - DNA, 87 bp, synthetic construct
  misc_feature 1..87: note = Synthetic Polynucleotide
  source 1..87: mol_type = other DNA
  modified_base 9: mod_base = OTHER; note = Uracil
  modified_base 14: mod_base = OTHER; note = Uracil
  modified_base 29..31: mod_base = OTHER; note = Uracil
  modified_base 34: mod_base = OTHER; note = Uracil
  modified_base 40..41: mod_base = OTHER; note = Uracil
  modified_base 44: mod_base = OTHER; note = Uracil
  modified_base 48: mod_base = OTHER; note = Uracil
  modified_base 55: mod_base = OTHER; note = Uracil
  modified_base 58: mod_base = OTHER; note = Uracil
  modified_base 71: mod_base = OTHER; note = Uracil
  modified_base 75: mod_base = OTHER; note = Uracil
  modified_base 81: mod_base = OTHER; note = Uracil
ggaggagctacgatgcggggaagcaacatttagtcgcgattgatacgtgcgcagtcatcagacagacgactcgctgaggatccgaca

SEQ ID NO: 283 - DNA, 87 bp, synthetic construct
  misc_feature 1..87: note = Synthetic Polynucleotide
  source 1..87: mol_type = other DNA
  modified_base 9: mod_base = OTHER; note = Uracil
  modified_base 14: mod_base = OTHER; note = Uracil
  modified_base 30..31: mod_base = OTHER; note = Uracil
  modified_base 34: mod_base = OTHER; note = Uracil
  modified_base 40..41: mod_base = OTHER; note = Uracil
  modified_base 44: mod_base = OTHER; note = Uracil
  modified_base 48: mod_base = OTHER; note = Uracil
  modified_base 55: mod_base = OTHER; note = Uracil
  modified_base 58: mod_base = OTHER; note = Uracil
  modified_base 71: mod_base = OTHER; note = Uracil
  modified_base 75: mod_base = OTHER; note = Uracil
  modified_base 81: mod_base = OTHER; note = Uracil
ggaggagctacgatgcggggaggcaacacttagtcgcgattgatacgtgcgcagtcatcagacagacgactcgctgaggatccgaca

SEQ ID NO: 284 - DNA, 87 bp, synthetic construct
  misc_feature 1..87: note = Synthetic Polynucleotide
  source 1..87: mol_type = other DNA
  modified_base 9: mod_base = OTHER; note = Uracil
  modified_base 14: mod_base = OTHER; note = Uracil
  modified_base 30..31: mod_base = OTHER; note = Uracil
  modified_base 34: mod_base = OTHER; note = Uracil
  modified_base 40..41: mod_base = OTHER; note = Uracil
  modified_base 44: mod_base = OTHER; note = Uracil
  modified_base 48: mod_base = OTHER; note = Uracil
  modified_base 55: mod_base = OTHER; note = Uracil
  modified_base 58: mod_base = OTHER; note = Uracil
  modified_base 71: mod_base = OTHER; note = Uracil
  modified_base 75: mod_base = OTHER; note = Uracil
  modified_base 81: mod_base = OTHER; note = Uracil
ggaggagctacgatgcgggggagcaacacttagtcgcgattgatacgtgcgcagtcatcagacagacgactcgctgaggatccgaca

SEQ ID NO: 285 - DNA, 87 bp, synthetic construct
  misc_feature 1..87: note = Synthetic Polynucleotide
  source 1..87: mol_type = other DNA
  modified_base 9: mod_base = OTHER; note = Uracil
  modified_base 14: mod_base = OTHER; note = Uracil
  modified_base 27: mod_base = OTHER; note = Uracil
  modified_base 30..31: mod_base = OTHER; note = Uracil
  modified_base 34: mod_base = OTHER; note = Uracil
  modified_base 40..41: mod_base = OTHER; note = Uracil
  modified_base 44: mod_base = OTHER; note = Uracil
  modified_base 48: mod_base = OTHER; note = Uracil
  modified_base 55: mod_base = OTHER; note = Uracil
  modified_base 58: mod_base = OTHER; note = Uracil
  modified_base 71: mod_base = OTHER; note = Uracil
  modified_base 75: mod_base = OTHER; note = Uracil
  modified_base 81: mod_base = OTHER; note = Uracil
ggaggagctacgatgcggggaagcaatacttagtcgcgattgatacgtgcgcagtcatcagacagacgactcgctgaggatccgaca

SEQ ID NO: 286 - DNA, 87 bp, synthetic construct
  misc_feature 1..87: note = Synthetic Polynucleotide
  source 1..87: mol_type = other DNA
  modified_base 9: mod_base = OTHER; note = Uracil
  modified_base 14: mod_base = OTHER; note = Uracil
  modified_base 30..31: mod_base = OTHER; note = Uracil
  modified_base 34: mod_base = OTHER; note = Uracil
  modified_base 40..41: mod_base = OTHER; note = Uracil
  modified_base 44: mod_base = OTHER; note = Uracil
  modified_base 48: mod_base = OTHER; note = Uracil
  modified_base 55: mod_base = OTHER; note = Uracil
  modified_base 58: mod_base = OTHER; note = Uracil
  modified_base 71: mod_base = OTHER; note = Uracil
  modified_base 75: mod_base = OTHER; note = Uracil
  modified_base 81: mod_base = OTHER; note = Uracil
ggaggagctacgatgcggggaagcaacacttagtcgggattgatacgtgcccagtcatcagacagacgactcgctgaggatccgaca

SEQ ID NO: 287 - DNA, 85 bp, synthetic construct; identical to SEQ ID NO: 156
  misc_feature 1..85: note = Synthetic Polynucleotide
  source 1..85: mol_type = other DNA
  modified_base 9: mod_base = OTHER; note = Uracil
  modified_base 14: mod_base = OTHER; note = Uracil
  modified_base 22: mod_base = OTHER; note = Uracil
  modified_base 24: mod_base = OTHER; note = Uracil
  modified_base 28: mod_base = OTHER; note = Uracil
  modified_base 30: mod_base = OTHER; note = Uracil
  modified_base 33: mod_base = OTHER; note = Uracil
  modified_base 38: mod_base = OTHER; note = Uracil
  modified_base 49: mod_base = OTHER; note = Uracil
  modified_base 51: mod_base = OTHER; note = Uracil
  modified_base 53: mod_base = OTHER; note = Uracil
  modified_base 57: mod_base = OTHER; note = Uracil
  modified_base 69: mod_base = OTHER; note = Uracil
  modified_base 73: mod_base = OTHER; note = Uracil
  modified_base 79: mod_base = OTHER; note = Uracil

SEQ ID NO: 288 - DNA, 87 bp, synthetic construct
  misc_feature 1..87: note = Synthetic Polynucleotide
  source 1..87: mol_type = other DNA
  modified_base 9: mod_base = OTHER; note = Uracil
  modified_base 14: mod_base = OTHER; note = Uracil
  modified_base 19: mod_base = OTHER; note = Uracil
  modified_base 22..23: mod_base = OTHER; note = Uracil
  modified_base 25: mod_base = OTHER; note = Uracil
  modified_base 33: mod_base = OTHER; note = Uracil
  modified_base 45: mod_base = OTHER; note = Uracil
  modified_base 47: mod_base = OTHER; note = Uracil
  modified_base 51..52: mod_base = OTHER; note = Uracil
  modified_base 54..55: mod_base = OTHER; note = Uracil
  modified_base 62: mod_base = OTHER; note = Uracil
  modified_base 71: mod_base = OTHER; note = Uracil
  modified_base 75: mod_base = OTHER; note = Uracil
  modified_base 81: mod_base = OTHER; note = Uracil
ggaggagctacgatgcggtaattctcaggaggtacggaacgggatatggattgttcgccagtcagacgactcgctgaggatccgaca

SEQ ID NO: 289 - DNA, 87 bp, synthetic construct
  misc_feature 1..87: note = Synthetic Polynucleotide
  source 1..87: mol_type = other DNA
  modified_base 9: mod_base = OTHER; note = Uracil
  modified_base 14: mod_base = OTHER; note = Uracil
  modified_base 19: mod_base = OTHER; note = Uracil
  modified_base 22..23: mod_base = OTHER; note = Uracil
  modified_base 25: mod_base = OTHER; note = Uracil
  modified_base 33: mod_base = OTHER; note = Uracil
  modified_base 45: mod_base = OTHER; note = Uracil
  modified_base 47: mod_base = OTHER; note = Uracil
  modified_base 51: mod_base = OTHER; note = Uracil
  modified_base 54..55: mod_base = OTHER; note = Uracil
  modified_base 62: mod_base = OTHER; note = Uracil
  modified_base 71: mod_base = OTHER; note = Uracil
  modified_base 75: mod_base = OTHER; note = Uracil
  modified_base 81: mod_base = OTHER; note = Uracil
ggaggagctacgatgcggtaattctcaggaggtgcggaacgggatatggatggttcgccagtcagacgactcgctgaggatccgaca

SEQ ID NO: 290 - DNA, 87 bp, synthetic construct
  misc_feature 1..87: note = Synthetic Polynucleotide
  source 1..87: mol_type = other DNA
  modified_base 9: mod_base = OTHER; note = Uracil
  modified_base 14: mod_base = OTHER; note = Uracil
  modified_base 19: mod_base = OTHER; note = Uracil
  modified_base 22..23: mod_base = OTHER; note = Uracil
  modified_base 25: mod_base = OTHER; note = Uracil
  modified_base 33: mod_base = OTHER; note = Uracil
  modified_base 45: mod_base = OTHER; note = Uracil
  modified_base 47: mod_base = OTHER; note = Uracil
  modified_base 51..52: mod_base = OTHER; note = Uracil
  modified_base 54..55: mod_base = OTHER; note = Uracil
  modified_base 61: mod_base = OTHER; note = Uracil
  modified_base 71: mod_base = OTHER; note = Uracil
  modified_base 75: mod_base = OTHER; note = Uracil
  modified_base 81: mod_base = OTHER; note = Uracil
ggaggagctacgatgcggtaattctcaggaggtgcggaacgggatatgggttgttcgccatacagacgactcgctgaggatccgaca

SEQ ID NO: 291 - DNA, 87 bp, synthetic construct
  misc_feature 1..87: note = Synthetic Polynucleotide
  source 1..87: mol_type = other DNA
  modified_base 9: mod_base = OTHER; note = Uracil
  modified_base 14: mod_base = OTHER; note = Uracil
  modified_base 19: mod_base = OTHER; note = Uracil
  modified_base 22..23: mod_base = OTHER; note = Uracil
  modified_base 33: mod_base = OTHER; note = Uracil
  modified_base 45: mod_base = OTHER; note = Uracil
  modified_base 47: mod_base = OTHER; note = Uracil
  modified_base 51..52: mod_base = OTHER; note = Uracil
  modified_base 54..55: mod_base = OTHER; note = Uracil
  modified_base 62: mod_base = OTHER; note = Uracil
  modified_base 71: mod_base = OTHER; note = Uracil
  modified_base 75: mod_base = OTHER; note = Uracil
  modified_base 81: mod_base = OTHER; note = Uracil
ggaggagctacgatgcggtaattcccaggaggtgcggaacgggatatggattgttcgccagtcagacgactcgctgaggatccgaca

SEQ ID NO: 292 - DNA, 87 bp, synthetic construct
  misc_feature 1..87: note = Synthetic Polynucleotide
  source 1..87: mol_type = other DNA
  modified_base 9: mod_base = OTHER; note = Uracil
  modified_base 14: mod_base = OTHER; note = Uracil
  modified_base 19: mod_base = OTHER; note = Uracil
  modified_base 22..23: mod_base = OTHER; note = Uracil
  modified_base 33: mod_base = OTHER; note = Uracil
  modified_base 45: mod_base = OTHER; note = Uracil
  modified_base 47: mod_base = OTHER; note = Uracil
  modified_base 51..52: mod_base = OTHER; note = Uracil
  modified_base 54..55: mod_base = OTHER; note = Uracil
  modified_base 62: mod_base = OTHER; note = Uracil
  modified_base 71: mod_base = OTHER; note = Uracil
  modified_base 75: mod_base = OTHER; note = Uracil
  modified_base 81: mod_base = OTHER; note = Uracil
ggaggagctacgatgcggtaattcacaggaggtgcggaacgggatatggattgttcgccagtcagacgactcgctgaggatccgaca

SEQ ID NO: 293 - DNA, 86 bp, synthetic construct; identical to SEQ ID NO: 137
  misc_feature 1..86: note = Synthetic Polynucleotide
  source 1..86: mol_type = other DNA
  modified_base 9: mod_base = OTHER; note = Uracil
  modified_base 14: mod_base = OTHER; note = Uracil
  modified_base 23..24: mod_base = OTHER; note = Uracil
  modified_base 28: mod_base = OTHER; note = Uracil
  modified_base 31: mod_base = OTHER; note = Uracil
  modified_base 34: mod_base = OTHER; note = Uracil
  modified_base 38: mod_base = OTHER; note = Uracil
  modified_base 43: mod_base = OTHER; note = Uracil
  modified_base 48..49: mod_base = OTHER; note = Uracil
  modified_base 54..55: mod_base = OTHER; note = Uracil
  modified_base 61: mod_base = OTHER; note = Uracil
  modified_base 70: mod_base = OTHER; note = Uracil
  modified_base 74: mod_base = OTHER; note = Uracil
  modified_base 80: mod_base = OTHER; note = Uracil

SEQ ID NO: 294 - DNA, 86 bp, synthetic construct
  misc_feature 1..86: note = Synthetic Polynucleotide
  source 1..86: mol_type = other DNA
  modified_base 9: mod_base = OTHER; note = Uracil
  modified_base 14: mod_base = OTHER; note = Uracil
  modified_base 23: mod_base = OTHER; note = Uracil
  modified_base 27: mod_base = OTHER; note = Uracil
  modified_base 34: mod_base = OTHER; note = Uracil
  modified_base 37: mod_base = OTHER; note = Uracil
  modified_base 47: mod_base = OTHER; note = Uracil
  modified_base 50..51: mod_base = OTHER; note = Uracil
  modified_base 53..55: mod_base = OTHER; note = Uracil
  modified_base 61: mod_base = OTHER; note = Uracil
  modified_base 70: mod_base = OTHER; note = Uracil
  modified_base 74: mod_base = OTHER; note = Uracil
  modified_base 80: mod_base = OTHER; note = Uracil
ggaggagctacgatgcggcccatcactcacgcgtagtgcgaacgcatcgttatttagccgtcagacgactcgctgaggatccgaca

SEQ ID NO: 295 - DNA, 87 bp, synthetic construct
  misc_feature 1..87: note = Synthetic Polynucleotide
  source 1..87: mol_type = other DNA
  modified_base 9: mod_base = OTHER; note = Uracil
  modified_base 14: mod_base = OTHER; note = Uracil
  modified_base 19: mod_base = OTHER; note = Uracil
  modified_base 21: mod_base = OTHER; note = Uracil
  modified_base 26: mod_base = OTHER; note = Uracil
  modified_base 29..30: mod_base = OTHER; note = Uracil
  modified_base 34..36: mod_base = OTHER; note = Uracil
  modified_base 40..41: mod_base = OTHER; note = Uracil
  modified_base 54: mod_base = OTHER; note = Uracil
  modified_base 71: mod_base = OTHER; note = Uracil
  modified_base 75: mod_base = OTHER; note = Uracil
  modified_base 81: mod_base = OTHER; note = Uracil
ggaggagctacgatgcggtgtacactgattgcctttgggttaagagcgacagatccggcagacagacgactcgctgaggatccgaca

SEQ ID NO: 296 - DNA, 87 bp, synthetic construct
  misc_feature 1..87: note = Synthetic Polynucleotide
  source 1..87: mol_type = other DNA
  modified_base 9: mod_base = OTHER; note = Uracil
  modified_base 14: mod_base = OTHER; note = Uracil
  modified_base 30..31: mod_base = OTHER; note = Uracil
  modified_base 34: mod_base = OTHER; note = Uracil
  modified_base 40..41: mod_base = OTHER; note = Uracil
  modified_base 44: mod_base = OTHER; note = Uracil
  modified_base 48: mod_base = OTHER; note = Uracil
  modified_base 55: mod_base = OTHER; note = Uracil
  modified_base 58: mod_base = OTHER; note = Uracil
  modified_base 71: mod_base = OTHER; note = Uracil
  modified_base 75: mod_base = OTHER; note = Uracil
  modified_base 81: mod_base = OTHER; note = Uracil
ggaggagctacgatgcggggaagcgacacttagtcgcgattgatacgtgcgcagtcatcagacagacgactcgctgaggatccgaca

SEQ ID NO: 297 - DNA, 87 bp, synthetic construct
  misc_feature 1..87: note = Synthetic Polynucleotide
  source 1..87: mol_type = other DNA
  modified_base 9: mod_base = OTHER; note = Uracil
  modified_base 14: mod_base = OTHER; note = Uracil
  modified_base 30..31: mod_base = OTHER; note = Uracil
  modified_base 34: mod_base = OTHER; note = Uracil
  modified_base 40..41: mod_base = OTHER; note = Uracil
  modified_base 44: mod_base = OTHER; note = Uracil
  modified_base 48: mod_base = OTHER; note = Uracil
  modified_base 55: mod_base = OTHER; note = Uracil
  modified_base 71: mod_base = OTHER; note = Uracil
  modified_base 75: mod_base = OTHER; note = Uracil
  modified_base 81: mod_base = OTHER; note = Uracil
ggaggagctacgatgcggggaagcaacacttagtcgggattgatacgtgcccagtcagcagacagacgactcgctgaggatccgaca

SEQ ID NO: 298 - DNA, 87 bp, synthetic construct
  misc_feature 1..87: note = Synthetic Polynucleotide
  source 1..87: mol_type = other DNA
  modified_base 9: mod_base = OTHER; note = Uracil
  modified_base 14: mod_base = OTHER; note = Uracil
  modified_base 19: mod_base = OTHER; note = Uracil
  modified_base 22..23: mod_base = OTHER; note = Uracil
  modified_base 25: mod_base = OTHER; note = Uracil
  modified_base 45: mod_base = OTHER; note = Uracil
  modified_base 47: mod_base = OTHER; note = Uracil
  modified_base 51..52: mod_base = OTHER; note = Uracil
  modified_base 54..55: mod_base = OTHER; note = Uracil
  modified_base 62: mod_base = OTHER; note = Uracil
  modified_base 71: mod_base = OTHER; note = Uracil
  modified_base 75: mod_base = OTHER; note = Uracil
  modified_base 81: mod_base = OTHER; note = Uracil
ggaggagctacgatgcggtaattctcaggaggcgcggaacgggatatggattgttcgccagtcagacgactcgctgaggatccgaca

SEQ ID NO: 299 - DNA, 87 bp, synthetic construct
  misc_feature 1..87: note = Synthetic Polynucleotide
  source 1..87: mol_type = other DNA
  modified_base 9: mod_base = OTHER; note = Uracil
  modified_base 14: mod_base = OTHER; note = Uracil
  modified_base 19: mod_base = OTHER; note = Uracil
  modified_base 22..23: mod_base = OTHER; note = Uracil
  modified_base 25: mod_base = OTHER; note = Uracil
  modified_base 45: mod_base = OTHER; note = Uracil
  modified_base 47: mod_base = OTHER; note = Uracil
  modified_base 51..52: mod_base = OTHER; note = Uracil
  modified_base 54..55: mod_base = OTHER; note = Uracil
  modified_base 62: mod_base = OTHER; note = Uracil
  modified_base 71: mod_base = OTHER; note = Uracil
  modified_base 75: mod_base = OTHER; note = Uracil
  modified_base 81: mod_base = OTHER; note = Uracil
ggaggagctacgatgcggtaattctcaggaggagcggaacgggatatggattgttcgccagtcagacgactcgctgaggatccgaca

SEQ ID NO: 300 - DNA, 87 bp, synthetic construct
  misc_feature 1..87: note = Synthetic Polynucleotide
  source 1..87: mol_type = other DNA
  modified_base 9: mod_base = OTHER; note = Uracil
  modified_base 14: mod_base = OTHER; note = Uracil
  modified_base 19: mod_base = OTHER; note = Uracil
  modified_base 22..23: mod_base = OTHER; note = Uracil
  modified_base 25: mod_base = OTHER; note = Uracil
  modified_base 33: mod_base = OTHER; note = Uracil
  modified_base 45: mod_base = OTHER; note = Uracil
  modified_base 51..52: mod_base = OTHER; note = Uracil
  modified_base 54..55: mod_base = OTHER; note = Uracil
  modified_base 62: mod_base = OTHER; note = Uracil
  modified_base 71: mod_base = OTHER; note = Uracil
  modified_base 75: mod_base = OTHER; note = Uracil
  modified_base 81: mod_base = OTHER; note = Uracil
ggaggagctacgatgcggtaattctcaggaggtgcggaacgggatacggattgttcgccagtcagacgactcgctgaggatccgaca

SEQ ID NO: 301 - DNA, 87 bp, synthetic construct
  misc_feature 1..87: note = Synthetic Polynucleotide
  source 1..87: mol_type = other DNA
  modified_base 9: mod_base = OTHER; note = Uracil
  modified_base 14: mod_base = OTHER; note = Uracil
  modified_base 19: mod_base = OTHER; note = Uracil
  modified_base 22..23: mod_base = OTHER; note = Uracil
  modified_base 25: mod_base = OTHER; note = Uracil
  modified_base 33: mod_base = OTHER; note = Uracil
  modified_base 45: mod_base = OTHER; note = Uracil
  modified_base 51..52: mod_base = OTHER; note = Uracil
  modified_base 54..55: mod_base = OTHER; note = Uracil
  modified_base 62: mod_base = OTHER; note = Uracil
  modified_base 71: mod_base = OTHER; note = Uracil
  modified_base 75: mod_base = OTHER; note = Uracil
  modified_base 81: mod_base = OTHER; note = Uracil
ggaggagctacgatgcggtaattctcaggaggtgcggaacgggataaggattgttcgccagtcagacgactcgctgaggatccgaca

SEQ ID NO: 302 - DNA, 87 bp, synthetic construct
  misc_feature 1..87: note = Synthetic Polynucleotide
  source 1..87: mol_type = other DNA
  modified_base 9: mod_base = OTHER; note = Uracil
  modified_base 14: mod_base = OTHER; note = Uracil
  modified_base 19: mod_base = OTHER; note = Uracil
  modified_base 22..23: mod_base = OTHER; note = Uracil
  modified_base 25: mod_base = OTHER; note = Uracil
  modified_base 33: mod_base = OTHER; note = Uracil
  modified_base 45: mod_base = OTHER; note = Uracil
  modified_base 47: mod_base = OTHER; note = Uracil
  modified_base 51..52: mod_base = OTHER; note = Uracil
  modified_base 55: mod_base = OTHER; note = Uracil
  modified_base 62: mod_base = OTHER; note = Uracil
  modified_base 71: mod_base = OTHER; note = Uracil
  modified_base 75: mod_base = OTHER; note = Uracil
  modified_base 81: mod_base = OTHER; note = Uracil
ggaggagctacgatgcggtaattctcaggaggtgcggaacgggatatggattgctcgccagtcagacgactcgctgaggatccgaca

SEQ ID NO: 303 - DNA, 87 bp, synthetic construct
  misc_feature 1..87: note = Synthetic Polynucleotide
  source 1..87: mol_type = other DNA
  modified_base 9: mod_base = OTHER; note = Uracil
  modified_base 14: mod_base = OTHER; note = Uracil
  modified_base 19: mod_base = OTHER; note = Uracil
  modified_base 22..23: mod_base = OTHER; note = Uracil
  modified_base 25: mod_base = OTHER; note = Uracil
  modified_base 33: mod_base = OTHER; note = Uracil
  modified_base 45: mod_base = OTHER; note = Uracil
  modified_base 47: mod_base = OTHER; note = Uracil
  modified_base 51..52: mod_base = OTHER; note = Uracil
  modified_base 54..55: mod_base = OTHER; note = Uracil
  modified_base 62: mod_base = OTHER; note = Uracil
  modified_base 71: mod_base = OTHER; note = Uracil
  modified_base 75: mod_base = OTHER; note = Uracil
  modified_base 81: mod_base = OTHER; note = Uracil
ggaggagctacgatgcggtaattctcaggaggtgcggaacgggatatggattattcgccagtcagacgactcgctgaggatccgaca

SEQ ID NO: 304 - DNA, 87 bp, synthetic construct
  misc_feature 1..87: note = Synthetic Polynucleotide
  source 1..87: mol_type = other DNA
  modified_base 9: mod_base = OTHER; note = Uracil
  modified_base 14: mod_base = OTHER; note = Uracil
  modified_base 19: mod_base = OTHER; note = Uracil
  modified_base 22..23: mod_base = OTHER; note = Uracil
  modified_base 25: mod_base = OTHER; note = Uracil
  modified_base 33: mod_base = OTHER; note = Uracil
  modified_base 45: mod_base = OTHER; note = Uracil
  modified_base 47: mod_base = OTHER; note = Uracil
  modified_base 51..52: mod_base = OTHER; note = Uracil
  modified_base 54: mod_base = OTHER; note = Uracil
  modified_base 62: mod_base = OTHER; note = Uracil
  modified_base 71: mod_base = OTHER; note = Uracil
  modified_base 75: mod_base = OTHER; note = Uracil
  modified_base 81: mod_base = OTHER; note = Uracil
ggaggagctacgatgcggtaattctcaggaggtgcggaacgggatatggattgtgcgccagtcagacgactcgctgaggatccgaca

SEQ ID NO: 305 - DNA, 87 bp, synthetic construct
  misc_feature 1..87: note = Synthetic Polynucleotide
  source 1..87: mol_type = other DNA
  modified_base 9: mod_base = OTHER; note = Uracil
  modified_base 14: mod_base = OTHER; note = Uracil
  modified_base 19: mod_base = OTHER; note = Uracil
  modified_base 22..23: mod_base = OTHER; note = Uracil
  modified_base 25: mod_base = OTHER; note = Uracil
  modified_base 33: mod_base = OTHER; note = Uracil
  modified_base 45: mod_base = OTHER; note = Uracil
  modified_base 47: mod_base = OTHER; note = Uracil
  modified_base 51..52: mod_base = OTHER; note = Uracil
  modified_base 54: mod_base = OTHER; note = Uracil
  modified_base 62: mod_base = OTHER; note = Uracil
  modified_base 71: mod_base = OTHER; note = Uracil
  modified_base 75: mod_base = OTHER; note = Uracil
  modified_base 81: mod_base = OTHER; note = Uracil
ggaggagctacgatgcggtaattctcaggaggtgcggaacgggatatggattgtacgccagtcagacgactcgctgaggatccgaca

SEQ ID NO: 306 - DNA, 87 bp, synthetic construct
  misc_feature 1..87: note = Synthetic Polynucleotide
  source 1..87: mol_type = other DNA
  modified_base 9: mod_base = OTHER; note = Uracil
  modified_base 14: mod_base = OTHER; note = Uracil
  modified_base 19: mod_base = OTHER; note = Uracil
  modified_base 22..23: mod_base = OTHER; note = Uracil
  modified_base 25: mod_base = OTHER; note = Uracil
  modified_base 33: mod_base = OTHER; note = Uracil
  modified_base 45: mod_base = OTHER; note = Uracil
  modified_base 47: mod_base = OTHER; note = Uracil
  modified_base 51..52: mod_base = OTHER; note = Uracil
  modified_base 54..55: mod_base = OTHER; note = Uracil
  modified_base 62: mod_base = OTHER; note = Uracil
  modified_base 71: mod_base = OTHER; note = Uracil
  modified_base 75: mod_base = OTHER; note = Uracil
  modified_base 81: mod_base = OTHER; note = Uracil
ggaggagctacgatgcggtaattctcaggaggtgcggaacgggatatggattgttcgcaagtcagacgactcgctgaggatccgaca

SEQ ID NO: 307 - DNA, 87 bp, synthetic construct
  misc_feature 1..87: note = Synthetic Polynucleotide
  source 1..87: mol_type = other DNA
  modified_base 9: mod_base = OTHER; note = Uracil
  modified_base 14: mod_base = OTHER; note = Uracil
  modified_base 19: mod_base = OTHER; note = Uracil
  modified_base 22..23: mod_base = OTHER; note = Uracil
  modified_base 25: mod_base = OTHER; note = Uracil
  modified_base 33: mod_base = OTHER; note = Uracil
  modified_base 40: mod_base = OTHER; note = Uracil
  modified_base 45: mod_base = OTHER; note = Uracil
  modified_base 47: mod_base = OTHER; note = Uracil
  modified_base 51..52: mod_base = OTHER; note = Uracil
  modified_base 54..55: mod_base = OTHER; note = Uracil
  modified_base 62: mod_base = OTHER; note = Uracil
  modified_base 71: mod_base = OTHER; note = Uracil
  modified_base 75: mod_base = OTHER; note = Uracil
  modified_base 81: mod_base = OTHER; note = Uracil
ggaggagctacgatgcggtaattctcaggaggtgcggaatgggatatggattgttcgccagtcagacgactcgctgaggatccgaca

SEQ ID NO: 308 - DNA, 87 bp, synthetic construct
  misc_feature 1..87: note = Synthetic Polynucleotide
  source 1..87: mol_type = other DNA
  modified_base 9: mod_base = OTHER; note = Uracil
  modified_base 14: mod_base = OTHER; note = Uracil
  modified_base 19: mod_base = OTHER; note = Uracil
  modified_base 22..23: mod_base = OTHER; note = Uracil
  modified_base 33: mod_base = OTHER; note = Uracil
  modified_base 45: mod_base = OTHER; note = Uracil
  modified_base 47: mod_base = OTHER; note = Uracil
  modified_base 51..52: mod_base = OTHER; note = Uracil
  modified_base 54..55: mod_base = OTHER; note = Uracil
  modified_base 71: mod_base = OTHER; note = Uracil
  modified_base 75: mod_base = OTHER; note = Uracil
  modified_base 81: mod_base = OTHER; note = Uracil
ggaggagctacgatgcggtaattcgcaggaggtgcggaacgggatatggattgttcgccagacagacgactcgctgaggatccgaca

SEQ ID NO: 309 - DNA, 86 bp, synthetic construct
  misc_feature 1..86: note = Synthetic Polynucleotide
  source 1..86: mol_type = other DNA
  modified_base 9: mod_base = OTHER; note = Uracil
  modified_base 14: mod_base = OTHER; note = Uracil
  modified_base 23: mod_base = OTHER; note = Uracil
  modified_base 27: mod_base = OTHER; note = Uracil
  modified_base 34: mod_base = OTHER; note = Uracil
  modified_base 36..37: mod_base = OTHER; note = Uracil
  modified_base 47: mod_base = OTHER; note = Uracil
  modified_base 50..51: mod_base = OTHER; note = Uracil
  modified_base 53..55: mod_base = OTHER; note = Uracil
  modified_base 61: mod_base = OTHER; note = Uracil
  modified_base 70: mod_base = OTHER; note = Uracil
  modified_base 74: mod_base = OTHER; note = Uracil
  modified_base 80: mod_base = OTHER; note = Uracil
ggaggagctacgatgcggcccatcactcccgcgtattgcgaccgcatcgttatttagccgtcagacgactcgctgaggatccgaca

SEQ ID NO: 310 - DNA, 87 bp, synthetic construct
  misc_feature 1..87: note = Synthetic Polynucleotide
  source 1..87: mol_type = other DNA
  modified_base 9: mod_base = OTHER; note = Uracil
  modified_base 14: mod_base = OTHER; note = Uracil
  modified_base 20..21: mod_base = OTHER; note = Uracil
  modified_base 28..29: mod_base = OTHER; note = Uracil
  modified_base 42: mod_base = OTHER; note = Uracil
  modified_base 47: mod_base = OTHER; note = Uracil
  modified_base 52..55: mod_base = OTHER; note = Uracil
  modified_base 71: mod_base = OTHER; note = Uracil
  modified_base 75: mod_base = OTHER; note = Uracil
  modified_base 81: mod_base = OTHER; note = Uracil
ggaggagctacgatgcggattaccaacttgaacgccgaaagtggggtcacgttttccgcagacagacgactcgctgaggatccgaca

SEQ ID NO: 311 - DNA, 87 bp, synthetic construct
  misc_feature 1..87: note = Synthetic Polynucleotide
  source 1..87: mol_type = other DNA
  modified_base 9: mod_base = OTHER; note = Uracil
  modified_base 14: mod_base = OTHER; note = Uracil
  modified_base 30..31: mod_base = OTHER; note = Uracil
  modified_base 34: mod_base = OTHER; note = Uracil
  modified_base 40..41: mod_base = OTHER; note = Uracil
  modified_base 44: mod_base = OTHER; note = Uracil
  modified_base 48: mod_base = OTHER; note = Uracil
  modified_base 55: mod_base = OTHER; note = Uracil
  modified_base 58: mod_base = OTHER; note = Uracil
  modified_base 71: mod_base = OTHER; note = Uracil
  modified_base 75: mod_base = OTHER; note = Uracil
  modified_base 81: mod_base = OTHER; note = Uracil
ggaggagctacgatgcggggaagcaacacttagtcgcgattgatacgtgcgcagtcatcggacagacgactcgctgaggatccgaca

SEQ ID NO: 312 - DNA, 87 bp, synthetic construct
  misc_feature 1..87: note = Synthetic Polynucleotide
  source 1..87: mol_type = other DNA
  modified_base 9: mod_base = OTHER; note = Uracil
  modified_base 14: mod_base = OTHER; note = Uracil
  modified_base 19: mod_base = OTHER; note = Uracil
  modified_base 22..23: mod_base = OTHER; note = Uracil
  modified_base 25: mod_base = OTHER; note = Uracil
  modified_base 30: mod_base = OTHER; note = Uracil
  modified_base 33: mod_base = OTHER; note = Uracil
  modified_base 45: mod_base = OTHER; note = Uracil
  modified_base 47: mod_base = OTHER; note = Uracil
  modified_base 51..52: mod_base = OTHER; note = Uracil
  modified_base 54..55: mod_base = OTHER; note = Uracil
  modified_base 62: mod_base = OTHER; note = Uracil
  modified_base 71: mod_base = OTHER; note = Uracil
  modified_base 75: mod_base = OTHER; note = Uracil
  modified_base 81: mod_base = OTHER; note = Uracil
ggaggagctacgatgcggtaattctcaggtggtgcggaacgggatatggattgttcgccagtcagacgactcgctgaggatccgaca

SEQ ID NO: 313 - DNA, 87 bp, synthetic construct
  misc_feature 1..87: note = Synthetic Polynucleotide
  source 1..87: mol_type = other DNA
  modified_base 9: mod_base = OTHER; note = Uracil
  modified_base 14: mod_base = OTHER; note = Uracil
  modified_base 19: mod_base = OTHER; note = Uracil
  modified_base 22..23: mod_base = OTHER; note = Uracil
  modified_base 25: mod_base = OTHER; note = Uracil
  modified_base 33: mod_base = OTHER; note = Uracil
  modified_base 45: mod_base = OTHER; note = Uracil
  modified_base 47: mod_base = OTHER; note = Uracil
  modified_base 51..52: mod_base = OTHER; note = Uracil
  modified_base 54..55: mod_base = OTHER; note = Uracil
  modified_base 62: mod_base = OTHER; note = Uracil
  modified_base 71: mod_base = OTHER; note = Uracil
  modified_base 75: mod_base = OTHER; note = Uracil
  modified_base 81: mod_base = OTHER; note = Uracil
ggaggagctacgatgcggtgattctcaggaggtgcggaacgggatatggattgttcgccagtcagacgactcgctgaggatccgaca

SEQ ID NO: 314 - DNA, 87 bp, synthetic construct
  misc_feature 1..87: note = Synthetic Polynucleotide
  source 1..87: mol_type = other DNA
  modified_base 9: mod_base = OTHER; note = Uracil
  modified_base 14: mod_base = OTHER; note = Uracil
  modified_base 19: mod_base = OTHER; note = Uracil
  modified_base 22..23: mod_base = OTHER; note = Uracil
  modified_base 25: mod_base = OTHER; note = Uracil
  modified_base 33: mod_base = OTHER; note = Uracil
  modified_base 45: mod_base = OTHER; note = Uracil
  modified_base 47: mod_base = OTHER; note = Uracil
  modified_base 51..52: mod_base = OTHER; note = Uracil
  modified_base 54..55: mod_base = OTHER; note = Uracil
  modified_base 62: mod_base = OTHER; note = Uracil
  modified_base 71: mod_base = OTHER; note = Uracil
  modified_base 75: mod_base = OTHER; note = Uracil
  modified_base 81: mod_base = OTHER; note = Uracil
ggaggagctacgatgcggtaattctcaggaggtgcggaacgggatatgggttgttcgccagtcagacgactcgctgaggatccgaca

SEQ ID NO: 315 - DNA, 87 bp, synthetic construct
  misc_feature 1..87: note = Synthetic Polynucleotide
  source 1..87: mol_type = other DNA
  modified_base 9: mod_base = OTHER; note = Uracil
  modified_base 14: mod_base = OTHER; note = Uracil
  modified_base 23: mod_base = OTHER; note = Uracil
  modified_base 27: mod_base = OTHER; note = Uracil
  modified_base 34: mod_base = OTHER; note = Uracil
  modified_base 34..37: mod_base = OTHER; note = Uracil
  modified_base 47: mod_base = OTHER; note = Uracil
  modified_base 50..51: mod_base = OTHER; note = Uracil
  modified_base 53..55: mod_base = OTHER; note = Uracil
  modified_base 71: mod_base = OTHER; note = Uracil
  modified_base 75: mod_base = OTHER; note = Uracil
  modified_base 81: mod_base = OTHER; note = Uracil
ggaggagctacgatgcggcccatcactcccgcgtattgcgaacgcatcgttatttagccagacagacgactcgctgaggatccgaca

SEQ ID NO: 316 - DNA, 86 bp, synthetic construct
  misc_feature 1..86: note = Synthetic Polynucleotide
  source 1..86: mol_type = other DNA
  modified_base 9: mod_base = OTHER; note = Uracil
  modified_base 14: mod_base = OTHER; note = Uracil
  modified_base 23: mod_base = OTHER; note = Uracil
  modified_base 27: mod_base = OTHER; note = Uracil
  modified_base 36..37: mod_base = OTHER; note = Uracil
  modified_base 47: mod_base = OTHER; note = Uracil
  modified_base 50..51: mod_base = OTHER; note = Uracil
  modified_base 53..55: mod_base = OTHER; note = Uracil
  modified_base 61: mod_base = OTHER; note = Uracil
  modified_base 70: mod_base = OTHER; note = Uracil
  modified_base 74: mod_base = OTHER; note = Uracil
  modified_base 80: mod_base = OTHER; note = Uracil
ggaggagctacgatgcggcccatcactcacgcgaattgcgaacgcatcgttatttagccgtcagacgactcgctgaggatccgaca

SEQ ID NO: 317 - DNA, 86 bp, synthetic construct
  misc_feature 1..86: note = Synthetic Polynucleotide
  source 1..86: mol_type = other DNA
  modified_base 9: mod_base = OTHER; note = Uracil
  modified_base 14: mod_base = OTHER; note = Uracil
  modified_base 23: mod_base = OTHER; note = Uracil
  modified_base 27: mod_base = OTHER; note = Uracil
  modified_base 34: mod_base = OTHER; note = Uracil
  modified_base 36..37: mod_base = OTHER; note = Uracil
  modified_base 47: mod_base = OTHER; note = Uracil
  modified_base 50..51: mod_base = OTHER; note = Uracil
  modified_base 53..55: mod_base = OTHER; note = Uracil
  modified_base 61: mod_base = OTHER; note = Uracil
  modified_base 70: mod_base = OTHER; note = Uracil
  modified_base 74: mod_base = OTHER; note = Uracil
  modified_base 80: mod_base = OTHER; note = Uracil
ggaggagctacgatgcggcgcatcactcccgcgtattgcgaacgcatcgttatttagccgtcagacgactcgctgaggatccgaca

SEQ ID NO: 318 - DNA, 87 bp, synthetic construct; identical to SEQ ID NO: 45
  misc_feature 1..87: note = Synthetic Polynucleotide
  source 1..87: mol_type = other DNA
  modified_base 9: mod_base = OTHER; note = Uracil
  modified_base 14: mod_base = OTHER; note = Uracil
  modified_base 20..21: mod_base = OTHER; note = Uracil
  modified_base 28..29: mod_base = OTHER; note = Uracil
  modified_base 42: mod_base = OTHER; note = Uracil
  modified_base 44: mod_base = OTHER; note = Uracil
  modified_base 47: mod_base = OTHER; note = Uracil
  modified_base 52: mod_base = OTHER; note = Uracil
  modified_base 54..55: mod_base = OTHER; note = Uracil
  modified_base 57: mod_base = OTHER; note = Uracil
  modified_base 71: mod_base = OTHER; note = Uracil
  modified_base 75: mod_base = OTHER; note = Uracil
  modified_base 81: mod_base = OTHER; note = Uracil

SEQ ID NO: 319 - DNA, 87 bp, synthetic construct
  misc_feature 1..87: note = Synthetic Polynucleotide
  source 1..87: mol_type = other DNA
  modified_base 9: mod_base = OTHER; note = Uracil
  modified_base 14: mod_base = OTHER; note = Uracil
  modified_base 23: mod_base = OTHER; note = Uracil
  modified_base 26: mod_base = OTHER; note = Uracil
  modified_base 35..36: mod_base = OTHER; note = Uracil
  modified_base 32: mod_base = OTHER; note = Uracil
  modified_base 48: mod_base = OTHER; note = Uracil
  modified_base 57: mod_base = OTHER; note = Uracil
  modified_base 71: mod_base = OTHER; note = Uracil
  modified_base 75: mod_base = OTHER; note = Uracil
  modified_base 81: mod_base = OTHER; note = Uracil
ggaggagctacgatgcggcacatactgacaatggttaccagagcaggtccggcacatccagacagacgactcgctgaggatccgaca

SEQ ID NO: 320 - DNA, 87 bp, synthetic construct
  misc_feature 1..87: note = Synthetic Polynucleotide
  source 1..87: mol_type = other DNA
  modified_base 9: mod_base = OTHER; note = Uracil
  modified_base 14: mod_base = OTHER; note = Uracil
  modified_base 19..20: mod_base = OTHER; note = Uracil
  modified_base 26..28: mod_base = OTHER; note = Uracil
  modified_base 32: mod_base = OTHER; note = Uracil
  modified_base 35..36: mod_base = OTHER; note = Uracil
  modified_base 43..44: mod_base = OTHER; note = Uracil
  modified_base 49: mod_base = OTHER; note = Uracil
  modified_base 71: mod_base = OTHER; note = Uracil
  modified_base 75: mod_base = OTHER; note = Uracil
  modified_base 81: mod_base = OTHER; note = Uracil
ggaggagctacgatgcggttacgcgtttaagtcattgacgcgttacactggagggggccagacagacgactcgctgaggatccgaca

SEQ ID NO: 321 - DNA, 87 bp, synthetic construct; identical to SEQ ID NO: 154
  misc_feature 1..87: note = Synthetic Polynucleotide
  source 1..87: mol_type = other DNA
  modified_base 9: mod_base = OTHER; note = Uracil
  modified_base 14: mod_base = OTHER; note = Uracil
  modified_base 19: mod_base = OTHER; note = Uracil
  modified_base 24: mod_base = OTHER; note = Uracil
  modified_base 28: mod_base = OTHER; note = Uracil
  modified_base 33: mod_base = OTHER; note = Uracil
  modified_base 44: mod_base = OTHER; note = Uracil
  modified_base 50..52: mod_base = OTHER; note = Uracil
  modified_base 54: mod_base = OTHER; note = Uracil
  modified_base 71: mod_base = OTHER; note = Uracil
  modified_base 75: mod_base = OTHER; note = Uracil
  modified_base 81: mod_base = OTHER; note = Uracil

SEQ ID NO: 322 - DNA, 87 bp, synthetic construct
  misc_feature 1..87: note = Synthetic Polynucleotide
  source 1..87: mol_type = other DNA
  modified_base 9: mod_base = OTHER; note = Uracil
  modified_base 14: mod_base = OTHER; note = Uracil
  modified_base 30..31: mod_base = OTHER; note = Uracil
  modified_base 34: mod_base = OTHER; note = Uracil
  modified_base 37: mod_base = OTHER; note = Uracil
  modified_base 40..41: mod_base = OTHER; note = Uracil
  modified_base 44: mod_base = OTHER; note = Uracil
  modified_base 48: mod_base = OTHER; note = Uracil
  modified_base 55: mod_base = OTHER; note = Uracil
  modified_base 58: mod_base = OTHER; note = Uracil
  modified_base 71: mod_base = OTHER; note = Uracil
  modified_base 75: mod_base = OTHER; note = Uracil
  modified_base 81: mod_base = OTHER; note = Uracil
ggaggagctacgatgcggggaagcaacacttagtcgtgattgatacgtgcgcagtcatcagacagacgactcgctgaggatccgaca

SEQ ID NO: 323 - DNA, 87 bp, synthetic construct
  misc_feature 1..87: note = Synthetic Polynucleotide
  source 1..87: mol_type = other DNA
  modified_base 9: mod_base = OTHER; note = Uracil
  modified_base 14: mod_base = OTHER; note = Uracil
  modified_base 19: mod_base = OTHER; note = Uracil
  modified_base 22..23: mod_base = OTHER; note = Uracil
  modified_base 25: mod_base = OTHER; note = Uracil
  modified_base 33: mod_base = OTHER; note = Uracil
  modified_base 45: mod_base = OTHER; note = Uracil
  modified_base 47: mod_base = OTHER; note = Uracil
  modified_base 51..52: mod_base = OTHER; note = Uracil
  modified_base 54..55: mod_base = OTHER; note = Uracil
  modified_base 62: mod_base = OTHER; note = Uracil
  modified_base 71: mod_base = OTHER; note = Uracil
  modified_base 75: mod_base = OTHER; note = Uracil
  modified_base 81: mod_base = OTHER; note = Uracil
ggaggagctacgatgcggtaattctcgggaggtgcggaacgggatatggattgttcgccagtcagacgactcgctgaggatccgaca

SEQ ID NO: 324 - DNA, 87 bp, synthetic construct
  misc_feature 1..87: note = Synthetic Polynucleotide
  source 1..87: mol_type = other DNA
  modified_base 9: mod_base = OTHER; note = Uracil
  modified_base 14: mod_base = OTHER; note = Uracil
  modified_base 19: mod_base = OTHER; note = Uracil
  modified_base 22..23: mod_base = OTHER; note = Uracil
  modified_base 25: mod_base = OTHER; note = Uracil
  modified_base 33: mod_base = OTHER; note = Uracil
  modified_base 45: mod_base = OTHER; note = Uracil
  modified_base 47: mod_base = OTHER; note = Uracil
  modified_base 51..52: mod_base = OTHER; note = Uracil
  modified_base 54..55: mod_base = OTHER; note = Uracil
  modified_base 62: mod_base = OTHER; note = Uracil
  modified_base 71: mod_base = OTHER; note = Uracil
  modified_base 75: mod_base = OTHER; note = Uracil
  modified_base 81: mod_base = OTHER; note = Uracil
ggaggagctacgatgcggtaattctcaggaggtgcagaacgggatatggattgttcgccagtcagacgactcgctgaggatccgaca

SEQ ID NO: 325 - DNA, 87 bp, synthetic construct
  misc_feature 1..87: note = Synthetic Polynucleotide
  source 1..87: mol_type = other DNA
  modified_base 9: mod_base = OTHER; note = Uracil
  modified_base 14: mod_base = OTHER; note = Uracil
  modified_base 19: mod_base = OTHER; note = Uracil
  modified_base 22..23: mod_base = OTHER; note = Uracil
  modified_base 25: mod_base = OTHER; note = Uracil
  modified_base 33: mod_base = OTHER; note = Uracil
  modified_base 45: mod_base = OTHER; note = Uracil
  modified_base 47: mod_base = OTHER; note = Uracil
  modified_base 51..52: mod_base = OTHER; note = Uracil
  modified_base 54..55: mod_base = OTHER; note = Uracil
  modified_base 62: mod_base = OTHER; note = Uracil
  modified_base 71: mod_base = OTHER; note = Uracil
  modified_base 75: mod_base = OTHER; note = Uracil
  modified_base 81: mod_base = OTHER; note = Uracil
ggaggagctacgatgcggtaattctcaggaggtgcggaacgggatatggattgttggccagtcagacgactcgctgaggatccgaca

SEQ ID NO: 326 - DNA, 87 bp, synthetic construct
  misc_feature 1..87: note = Synthetic Polynucleotide
  source 1..87: mol_type = other DNA
  modified_base 9: mod_base = OTHER; note = Uracil
  modified_base 14: mod_base = OTHER; note = Uracil
  modified_base 19: mod_base = OTHER; note = Uracil
  modified_base 22..23: mod_base = OTHER; note = Uracil
  modified_base 25: mod_base = OTHER; note = Uracil
  modified_base 33: mod_base = OTHER; note = Uracil
  modified_base 45: mod_base = OTHER; note = Uracil
  modified_base 47: mod_base = OTHER; note = Uracil
  modified_base 51..52: mod_base = OTHER; note = Uracil
  modified_base 54..55: mod_base = OTHER; note = Uracil
  modified_base 62: mod_base = OTHER; note = Uracil
  modified_base 71: mod_base = OTHER; note = Uracil
  modified_base 75: mod_base = OTHER; note = Uracil
  modified_base 81: mod_base = OTHER; note = Uracil
ggaggagctacgatgcggtaattctcaggaggtgcggaacgggatatggattgttagccagtcagacgactcgctgaggatccgaca

SEQ ID NO: 327 - DNA, 86 bp, synthetic construct
  misc_feature 1..86: note = Synthetic Polynucleotide
  source 1..86: mol_type = other DNA
  modified_base 9: mod_base = OTHER; note = Uracil
  modified_base 14: mod_base = OTHER; note = Uracil
  modified_base 23: mod_base = OTHER; note = Uracil
  modified_base 27: mod_base = OTHER; note = Uracil
  modified_base 34: mod_base = OTHER; note = Uracil
  modified_base 36..37: mod_base = OTHER; note = Uracil
  modified_base 47: mod_base = OTHER; note = Uracil
  modified_base 50..51: mod_base = OTHER; note = Uracil
  modified_base 53..55: mod_base = OTHER; note = Uracil
  modified_base 61: mod_base = OTHER; note = Uracil
  modified_base 70: mod_base = OTHER; note = Uracil
  modified_base 74: mod_base = OTHER; note = Uracil
  modified_base 74: mod_base = OTHER; note = Uracil
  modified_base 80: mod_base = OTHER; note = Uracil
ggaggagctacgatgcggcggatcactcccgcgtattgcgaacgcatcgttatttagccgtcagacgactcgctgaggatccgaca

SEQ ID NO: 328 - DNA, 86 bp, synthetic construct
  misc_feature 1..86: note = Synthetic Polynucleotide
  source 1..86: mol_type = other DNA
  modified_base 9: mod_base = OTHER; note = Uracil
  modified_base 14: mod_base = OTHER; note = Uracil
  modified_base 23: mod_base = OTHER; note = Uracil
  modified_base 27: mod_base = OTHER; note = Uracil
  modified_base 34: mod_base = OTHER; note = Uracil
  modified_base 36..37: mod_base = OTHER; note = Uracil
  modified_base 47: mod_base = OTHER; note = Uracil
  modified_base 50..51: mod_base = OTHER; note = Uracil
  modified_base 53..54: mod_base = OTHER; note = Uracil
  modified_base 61: mod_base = OTHER; note = Uracil
  modified_base 70: mod_base = OTHER; note = Uracil
  modified_base 74: mod_base = OTHER; note = Uracil
  modified_base 80: mod_base = OTHER; note = Uracil
ggaggagctacgatgcggcccatcactcccgcgtattgcgaacgcatcgttattgagccgtcagacgactcgctgaggatccgaca

SEQ ID NO: 329 - DNA, 86 bp, synthetic construct
  misc_feature 1..86: note = Synthetic Polynucleotide
  source 1..86: mol_type = other DNA
  modified_base 9: mod_base = OTHER; note = Uracil
  modified_base 14: mod_base = OTHER; note = Uracil
  modified_base 23: mod_base = OTHER; note = Uracil
  modified_base 27: mod_base = OTHER; note = Uracil
  modified_base 34: mod_base = OTHER; note = Uracil
  modified_base 36..37: mod_base = OTHER; note = Uracil
  modified_base 47: mod_base = OTHER; note = Uracil
  modified_base 50..51: mod_base = OTHER; note = Uracil
  modified_base 53..55: mod_base = OTHER; note = Uracil
  modified_base 61: mod_base = OTHER; note = Uracil
  modified_base 70: mod_base = OTHER; note = Uracil
  modified_base 74: mod_base = OTHER; note = Uracil
  modified_base 80: mod_base = OTHER; note = Uracil
ggaggagctacgatgcggcccatcactcgcgcgtattgcgaacgcatagttatttagccgtcagacgactcgctgaggatccgaca

SEQ ID NO: 330 - DNA, 87 bp, synthetic construct
  misc_feature 1..87: note = Synthetic Polynucleotide
  source 1..87: mol_type = other DNA
  modified_base 9: mod_base = OTHER; note = Uracil
  modified_base 14: mod_base = OTHER; note = Uracil
  modified_base 27: mod_base = OTHER; note = Uracil
  modified_base 30: mod_base = OTHER; note = Uracil
  modified_base 50: mod_base = OTHER; note = Uracil
  modified_base 54: mod_base = OTHER; note = Uracil
  modified_base 71: mod_base = OTHER; note = Uracil
  modified_base 75: mod_base = OTHER; note = Uracil
  modified_base 81: mod_base = OTHER; note = Uracil
ggaggagctacgatgcggcaacaaactaatcagacacgaggcagaaagataggtccggcagacagacgactcgctgaggatccgaca

SEQ ID NO: 331 - DNA, 78 bp, synthetic construct
  misc_feature 1..78: note = Synthetic Polynucleotide
  source 1..78: mol_type = other DNA
  modified_base 9: mod_base = OTHER; note = Uracil
  modified_base 14: mod_base = OTHER; note = Uracil
  modified_base 19: mod_base = OTHER; note = Uracil
  modified_base 21: mod_base = OTHER; note = Uracil
  modified_base 30: mod_base = OTHER; note = Uracil
  modified_base 35..36: mod_base = OTHER; note = Uracil
  modified_base 38..39: mod_base = OTHER; note = Uracil
  modified_base 43: mod_base = OTHER; note = Uracil
  modified_base 46: mod_base = OTHER; note = Uracil
  modified_base 48: mod_base = OTHER; note = Uracil
  modified_base 50..51: mod_base = OTHER; note = Uracil
  modified_base 53: mod_base = OTHER; note = Uracil
  modified_base 62: mod_base = OTHER; note = Uracil
  modified_base 66: mod_base = OTHER; note = Uracil
  modified_base 72: mod_base = OTHER; note = Uracil
ggaggagctacgatgcggtgtagcgagaatcgcgttgttgggtggtctgttgtcagacgactcgctgaggatccgaca

SEQ ID NO: 332 - DNA, 87 bp, synthetic construct
  misc_feature 1..87: note = Synthetic Polynucleotide
  source 1..87: mol_type = other DNA
  modified_base 9: mod_base = OTHER; note = Uracil
  modified_base 14: mod_base = OTHER; note = Uracil
  modified_base 30..31: mod_base = OTHER; note = Uracil
  modified_base 34: mod_base = OTHER; note = Uracil
  modified_base 40..41: mod_base = OTHER; note = Uracil
  modified_base 44: mod_base = OTHER; note = Uracil
  modified_base 48: mod_base = OTHER; note = Uracil
  modified_base 55..56: mod_base = OTHER; note = Uracil
  modified_base 58: mod_base = OTHER; note = Uracil
  modified_base 71: mod_base = OTHER; note = Uracil
  modified_base 75: mod_base = OTHER; note = Uracil
  modified_base 81: mod_base = OTHER; note = Uracil
ggaggagctacgatgcggggaagcaacacttagtcgcgattgatacgtgcgcagttatcagacagacgactcgctgaggatccgaca

SEQ ID NO: 333 - DNA, 87 bp, synthetic construct; identical to SEQ ID NO: 24
  misc_feature 1..87: note = Synthetic Polynucleotide
  source 1..87: mol_type = other DNA
  modified_base 9: mod_base = OTHER; note = Uracil
  modified_base 14: mod_base = OTHER; note = Uracil
  modified_base 30..31: mod_base = OTHER; note = Uracil
  modified_base 34: mod_base = OTHER; note = Uracil
  modified_base 40..41: mod_base = OTHER; note = Uracil
  modified_base 44: mod_base = OTHER; note = Uracil
  modified_base 48: mod_base = OTHER; note = Uracil
  modified_base 55: mod_base = OTHER; note = Uracil
  modified_base 58: mod_base = OTHER; note = Uracil
  modified_base 71: mod_base = OTHER; note = Uracil
  modified_base 75: mod_base = OTHER; note = Uracil
  modified_base 81: mod_base = OTHER; note = Uracil

SEQ ID NO: 334 - DNA, 87 bp, synthetic construct
  misc_feature 1..87: note = Synthetic Polynucleotide
  source 1..87: mol_type = other DNA
  modified_base 9: mod_base = OTHER; note = Uracil
  modified_base 14: mod_base = OTHER; note = Uracil
  modified_base 19: mod_base = OTHER; note = Uracil
  modified_base 30..31: mod_base = OTHER; note = Uracil
  modified_base 34: mod_base = OTHER; note = Uracil
  modified_base 40..41: mod_base = OTHER; note = Uracil
  modified_base 44: mod_base = OTHER; note = Uracil
  modified_base 48: mod_base = OTHER; note = Uracil
  modified_base 55: mod_base = OTHER; note = Uracil
  modified_base 58: mod_base = OTHER; note = Uracil
  modified_base 71: mod_base = OTHER; note = Uracil
  modified_base 75: mod_base = OTHER; note = Uracil
  modified_base 81: mod_base = OTHER; note = Uracil
ggaggagctacgatgcggtgaagcaacacttagtcgcgattgatacgtgcgcagtcatcagacagacgactcgctgaggatccgaca

SEQ ID NO: 335 - DNA, 87 bp, synthetic construct
  misc_feature 1..87: note = Synthetic Polynucleotide
  source 1..87: mol_type = other DNA
  modified_base 9: mod_base = OTHER; note = Uracil
  modified_base 14: mod_base = OTHER; note = Uracil
  modified_base 30..31: mod_base = OTHER; note = Uracil
  modified_base 34: mod_base = OTHER; note = Uracil
  modified_base 40..41: mod_base = OTHER; note = Uracil
  modified_base 44: mod_base = OTHER; note = Uracil
  modified_base 48: mod_base = OTHER; note = Uracil
  modified_base 55: mod_base = OTHER; note = Uracil
  modified_base 58: mod_base = OTHER; note = Uracil
  modified_base 71: mod_base = OTHER; note = Uracil
  modified_base 75: mod_base = OTHER; note = Uracil
  modified_base 81: mod_base = OTHER; note = Uracil
ggaggagctacgatgcggggaagcaacacttggtcgcgattgatacgtgcgcagtcatcagacagacgactcgctgaggatccgaca

SEQ ID NO: 336 - DNA, 87 bp, synthetic construct
  misc_feature 1..87: note = Synthetic Polynucleotide
  source 1..87: mol_type = other DNA
  modified_base 9: mod_base = OTHER; note = Uracil
  modified_base 14: mod_base = OTHER; note = Uracil
  modified_base 30..31: mod_base = OTHER; note = Uracil
  modified_base 34: mod_base = OTHER; note = Uracil
  modified_base 40..41: mod_base = OTHER; note = Uracil
  modified_base 44: mod_base = OTHER; note = Uracil
  modified_base 48: mod_base = OTHER; note = Uracil
  modified_base 55: mod_base = OTHER; note = Uracil
  modified_base 58: mod_base = OTHER; note = Uracil
  modified_base 71: mod_base = OTHER; note = Uracil
  modified_base 75: mod_base = OTHER; note = Uracil
  modified_base 81: mod_base = OTHER; note = Uracil
ggaggagctacgatgcggggaagcaacacttagtcgcgattgatacgtgcgcagtcatcaggcagacgactcgctgaggatccgaca

SEQ ID NO: 337 - DNA, 86 bp, synthetic construct
  misc_feature 1..86: note = Synthetic Polynucleotide
  source 1..86: mol_type = other DNA
  modified_base 9: mod_base = OTHER; note = Uracil
  modified_base 14: mod_base = OTHER; note = Uracil
  modified_base 29..30: mod_base = OTHER; note = Uracil
  modified_base 33: mod_base = OTHER; note = Uracil
  modified_base 39..40: mod_base = OTHER; note = Uracil
  modified_base 43: mod_base = OTHER; note = Uracil
  modified_base 47: mod_base = OTHER; note = Uracil
  modified_base 54: mod_base = OTHER; note = Uracil
  modified_base 57: mod_base = OTHER; note = Uracil
  modified_base 70: mod_base = OTHER; note = Uracil
  modified_base 74: mod_base = OTHER; note = Uracil
  modified_base 80: mod_base = OTHER; note = Uracil
ggaggagctacgatgcgggaagcaacacttagtcgcgattgatacgtgcgcagtcatcagacagacgactcgctgaggatccgaca

SEQ ID NO: 338 - DNA, 87 bp, synthetic construct
  misc_feature 1..87: note = Synthetic Polynucleotide
  source 1..87: mol_type = other DNA
  modified_base 9: mod_base = OTHER; note = Uracil
  modified_base 14: mod_base = OTHER; note = Uracil
  modified_base 30..31: mod_base = OTHER; note = Uracil
  modified_base 34: mod_base = OTHER; note = Uracil
  modified_base 40..41: mod_base = OTHER; note = Uracil
  modified_base 44: mod_base = OTHER; note = Uracil
  modified_base 48: mod_base = OTHER; note = Uracil
  modified_base 55: mod_base = OTHER; note = Uracil
  modified_base 58: mod_base = OTHER; note = Uracil
  modified_base 71: mod_base = OTHER; note = Uracil
  modified_base 75: mod_base = OTHER; note = Uracil
  modified_base 81: mod_base = OTHER; note = Uracil
ggaggagctacgatgcggggaagcagcacttagtcgcgattgatacgtgcgcagtcatcagacagacgactcgctgaggatccgaca

SEQ ID NO: 339 - DNA, 87 bp, synthetic construct
  misc_feature 1..87: note = Synthetic Polynucleotide
  source 1..87: mol_type = other DNA
  modified_base 9: mod_base = OTHER; note = Uracil
  modified_base 14: mod_base = OTHER; note = Uracil
  modified_base 24: mod_base = OTHER; note = Uracil
  modified_base 30..31: mod_base = OTHER; note = Uracil
  modified_base 34: mod_base = OTHER; note = Uracil
  modified_base 40..41: mod_base = OTHER; note = Uracil
  modified_base 44: mod_base = OTHER; note = Uracil
  modified_base 48: mod_base = OTHER; note = Uracil
  modified_base 55: mod_base = OTHER; note = Uracil
  modified_base 71: mod_base = OTHER; note = Uracil
  modified_base 58: mod_base = OTHER; note = Uracil
  modified_base 75: mod_base = OTHER; note = Uracil
  modified_base 81: mod_base = OTHER; note = Uracil
ggaggagctacgatgcggggaagtaacacttagtcgcgattgatacgtgcgcagtcatcagacagacgactcgctgaggatccgaca

SEQ ID NO: 340 - DNA, 87 bp, synthetic construct
  misc_feature 1..87: note = Synthetic Polynucleotide
  source 1..87: mol_type = other DNA
  modified_base 9: mod_base = OTHER; note = Uracil
  modified_base 14: mod_base = OTHER; note = Uracil
  modified_base 19: mod_base = OTHER; note = Uracil
  modified_base 23: mod_base = OTHER; note = Uracil
  modified_base 25: mod_base = OTHER; note = Uracil
  modified_base 33: mod_base = OTHER; note = Uracil
  modified_base 45: mod_base = OTHER; note = Uracil
  modified_base 47: mod_base = OTHER; note = Uracil
  modified_base 51..52: mod_base = OTHER; note = Uracil
  modified_base 54..55: mod_base = OTHER; note = Uracil
  modified_base 62: mod_base = OTHER; note = Uracil
  modified_base 71: mod_base = OTHER; note = Uracil
  modified_base 75: mod_base = OTHER; note = Uracil
  modified_base 81: mod_base = OTHER; note = Uracil
ggaggagctacgatgcggtaactctcaggaggtgcggaacgggatatggattgttcgccagtcagacgactcgctgaggatccgaca

SEQ ID NO: 341 - DNA, 87 bp, synthetic construct
  misc_feature 1..87: note = Synthetic Polynucleotide
  source 1..87: mol_type = other DNA
  modified_base 9: mod_base = OTHER; note = Uracil
  modified_base 14: mod_base = OTHER; note = Uracil
  modified_base 19: mod_base = OTHER; note = Uracil
  modified_base 22..23: mod_base = OTHER; note = Uracil
  modified_base 25: mod_base = OTHER; note = Uracil
  modified_base 33: mod_base = OTHER; note = Uracil
  modified_base 35: mod_base = OTHER; note = Uracil
  modified_base 45: mod_base = OTHER; note = Uracil
  modified_base 47: mod_base = OTHER; note = Uracil
  modified_base 51..52: mod_base = OTHER; note = Uracil
  modified_base 54..55: mod_base = OTHER; note = Uracil
  modified_base 62: mod_base = OTHER; note = Uracil
  modified_base 71: mod_base = OTHER; note = Uracil
  modified_base 75: mod_base = OTHER; note = Uracil
  modified_base 81: mod_base = OTHER; note = Uracil
ggaggagctacgatgcggtaattctcaggaggtgtggaacgggatatggattgttcgccagtcagacgactcgctgaggatccgaca

SEQ ID NO: 342 - DNA, 87 bp, synthetic construct
  misc_feature 1..87: note = Synthetic Polynucleotide
  source 1..87: mol_type = other DNA
  modified_base 9: mod_base = OTHER; note = Uracil
  modified_base 14: mod_base = OTHER; note = Uracil
  modified_base 19: mod_base = OTHER; note = Uracil
  modified_base 22..23: mod_base = OTHER; note = Uracil
  modified_base 25: mod_base = OTHER; note = Uracil
  modified_base 33: mod_base = OTHER; note = Uracil
  modified_base 44..45: mod_base = OTHER; note = Uracil
  modified_base 47: mod_base = OTHER; note = Uracil
  modified_base 51..52: mod_base = OTHER; note = Uracil
  modified_base 54..55: mod_base = OTHER; note = Uracil
  modified_base 62: mod_base = OTHER; note = Uracil
  modified_base 71: mod_base = OTHER; note = Uracil
  modified_base 75: mod_base = OTHER; note = Uracil
  modified_base 81: mod_base = OTHER; note = Uracil
ggaggagctacgatgcggtaattctcaggaggtgcggaacgggttatggattgttcgccagtcagacgactcgctgaggatccgaca

SEQ ID NO: 343 - DNA, 87 bp, synthetic construct
  misc_feature 1..87: note = Synthetic Polynucleotide
  source 1..87: mol_type = other DNA
  modified_base 9: mod_base = OTHER; note = Uracil
  modified_base 14: mod_base = OTHER; note = Uracil
  modified_base 19: mod_base = OTHER; note = Uracil
  modified_base 22..23: mod_base = OTHER; note = Uracil
  modified_base 25: mod_base = OTHER; note = Uracil
  modified_base 33: mod_base = OTHER; note = Uracil
  modified_base 45: mod_base = OTHER; note = Uracil
  modified_base 47: mod_base = OTHER; note = Uracil
  modified_base 51..52: mod_base = OTHER; note = Uracil
  modified_base 54..55: mod_base = OTHER; note = Uracil
  modified_base 62: mod_base = OTHER; note = Uracil
  modified_base 71: mod_base = OTHER; note = Uracil
  modified_base 75: mod_base = OTHER; note = Uracil
  modified_base 81: mod_base = OTHER; note = Uracil
ggaggagctacgatgcggtaattctcaggaggtgcggaacgggatatggattgttcgcgagtcagacgactcgctgaggatccgaca

SEQ ID NO: 344 - DNA, 86 bp, synthetic construct; identical to SEQ ID NO: 114
  misc_feature 1..86: note = Synthetic Polynucleotide
  source 1..86: mol_type = other DNA
  modified_base 9: mod_base = OTHER; note = Uracil
  modified_base 14: mod_base = OTHER; note = Uracil
  modified_base 23..25: mod_base = OTHER; note = Uracil
  modified_base 28: mod_base = OTHER; note = Uracil
  modified_base 31: mod_base = OTHER; note = Uracil
  modified_base 34: mod_base = OTHER; note = Uracil
  modified_base 38: mod_base = OTHER; note = Uracil
  modified_base 43: mod_base = OTHER; note = Uracil
  modified_base 48..49: mod_base = OTHER; note = Uracil
  modified_base 54..55: mod_base = OTHER; note = Uracil
  modified_base 61: mod_base = OTHER; note = Uracil
  modified_base 70: mod_base = OTHER; note = Uracil
  modified_base 74: mod_base = OTHER; note = Uracil
  modified_base 80: mod_base = OTHER; note = Uracil

SEQ ID NO: 345 - DNA, 86 bp, synthetic construct
  misc_feature 1..86: note = Synthetic Polynucleotide
  source 1..86: mol_type = other DNA
  modified_base 9: mod_base = OTHER; note = Uracil
  modified_base 14: mod_base = OTHER; note = Uracil
  modified_base 23: mod_base = OTHER; note = Uracil
  modified_base 37: mod_base = OTHER; note = Uracil
  modified_base 34: mod_base = OTHER; note = Uracil
  modified_base 36..37: mod_base = OTHER; note = Uracil
  modified_base 47: mod_base = OTHER; note = Uracil
  modified_base 50..51: mod_base = OTHER; note = Uracil
  modified_base 53..55: mod_base = OTHER; note = Uracil
  modified_base 61: mod_base = OTHER; note = Uracil
  modified_base 70: mod_base = OTHER; note = Uracil
  modified_base 74: mod_base = OTHER; note = Uracil
  modified_base 80: mod_base = OTHER; note = Uracil
ggaggagctacgatgcggcccatcactcgcgcgtattgcgaacgcatcgttatttagccgtcagacgactcgctgaggatccgaca

SEQ ID NO: 346 - DNA, 87 bp, synthetic construct; identical to SEQ ID NO: 135
  misc_feature 1..87: note = Synthetic Polynucleotide
  source 1..87: mol_type = other DNA
  modified_base 9: mod_base = OTHER; note = Uracil
  modified_base 14: mod_base = OTHER; note = Uracil
  modified_base 23: mod_base = OTHER; note = Uracil
  modified_base 30: mod_base = OTHER; note = Uracil
  modified_base 32: mod_base = OTHER; note = Uracil
  modified_base 35: mod_base = OTHER; note = Uracil
  modified_base 39: mod_base = OTHER; note = Uracil
  modified_base 49: mod_base = OTHER; note = Uracil
  modified_base 51: mod_base = OTHER; note = Uracil
  modified_base 54: mod_base = OTHER; note = Uracil
  modified_base 71: mod_base = OTHER; note = Uracil
  modified_base 75: mod_base = OTHER; note = Uracil
  modified_base 81: mod_base = OTHER; note = Uracil

SEQ ID NO: 347 - DNA, 87 bp, synthetic construct
  misc_feature 1..87: note = Synthetic Polynucleotide
  source 1..87: mol_type = other DNA
  modified_base 9: mod_base = OTHER; note = Uracil
  modified_base 14: mod_base = OTHER; note = Uracil
  modified_base 30: mod_base = OTHER; note = Uracil
  modified_base 32: mod_base = OTHER; note = Uracil
  modified_base 35: mod_base = OTHER; note = Uracil
  modified_base 39: mod_base = OTHER; note = Uracil
  modified_base 49: mod_base = OTHER; note = Uracil
  modified_base 51: mod_base = OTHER; note = Uracil
  modified_base 54: mod_base = OTHER; note = Uracil
  modified_base 71: mod_base = OTHER; note = Uracil
  modified_base 75: mod_base = OTHER; note = Uracil
  modified_base 81: mod_base = OTHER; note = Uracil
ggaggagctacgatgcggcaggggcgggatctaatgcgtagacagccatatactgacacagacagacgactcgctgaggatccgaca

SEQ ID NO: 348 - DNA, 87 bp, synthetic construct
  misc_feature 1..87: note = Synthetic Polynucleotide
  source 1..87: mol_type = other DNA
  modified_base 9: mod_base = OTHER; note = Uracil
  modified_base 14: mod_base = OTHER; note = Uracil
  modified_base 21: mod_base = OTHER; note = Uracil
  modified_base 24: mod_base = OTHER; note = Uracil
  modified_base 34: mod_base = OTHER; note = Uracil
  modified_base 37: mod_base = OTHER; note = Uracil
  modified_base 39: mod_base = OTHER; note = Uracil
  modified_base 41: mod_base = OTHER; note = Uracil
  modified_base 43: mod_base = OTHER; note = Uracil
  modified_base 54: mod_base = OTHER; note = Uracil
  modified_base 71: mod_base = OTHER; note = Uracil
  modified_base 75: mod_base = OTHER; note = Uracil
  modified_base 81: mod_base = OTHER; note = Uracil
ggaggagctacgatgcggcctagtacaaaagcctgatctctgtgagcagacactagaacagacagacgactcgctgaggatccgaca

SEQ ID NO: 349 - DNA, 87 bp, synthetic construct; identical to SEQ ID NO: 18
  misc_feature 1..87: note = Synthetic Polynucleotide
  source 1..87: mol_type = other DNA
  modified_base 9: mod_base = OTHER; note = Uracil
  modified_base 14: mod_base = OTHER; note = Uracil
  modified_base 19: mod_base = OTHER; note = Uracil
  modified_base 21: mod_base = OTHER; note = Uracil
  modified_base 26: mod_base = OTHER; note = Uracil
  modified_base 29..30: mod_base = OTHER; note = Uracil
  modified_base 34..36: mod_base = OTHER; note = Uracil
  modified_base 38: mod_base = OTHER; note = Uracil
  modified_base 40..41: mod_base = OTHER; note = Uracil
  modified_base 43: mod_base = OTHER; note = Uracil
  modified_base 54: mod_base = OTHER; note = Uracil
  modified_base 56: mod_base = OTHER; note = Uracil
  modified_base 71: mod_base = OTHER; note = Uracil
  modified_base 75: mod_base = OTHER; note = Uracil
  modified_base 81: mod_base = OTHER; note = Uracil

SEQ ID NO: 350 - DNA, 88 bp, synthetic construct
  misc_feature 1..88: note = Synthetic Polynucleotide
  source 1..88: mol_type = other DNA
  modified_base 9: mod_base = OTHER; note = Uracil
  modified_base 14: mod_base = OTHER; note = Uracil
  modified_base 21: mod_base = OTHER; note = Uracil
  modified_base 28..29: mod_base = OTHER; note = Uracil
  modified_base 33..35: mod_base = OTHER; note = Uracil
  modified_base 48: mod_base = OTHER; note = Uracil
  modified_base 50: mod_base = OTHER; note = Uracil
  modified_base 56: mod_base = OTHER; note = Uracil
  modified_base 72: mod_base = OTHER; note = Uracil
  modified_base 76: mod_base = OTHER; note = Uracil
  modified_base 82: mod_base = OTHER; note = Uracil
ggaggagctacgatgcggcatacacacttgactttagggaacgaacctctagccgtggccagacagacgactcgctgaggatccgaca

SEQ ID NO: 351 - DNA, 84 bp, synthetic construct; identical to SEQ ID NO: 211
  misc_feature 1..84: note = Synthetic Polynucleotide
  source 1..84: mol_type = other DNA
  modified_base 9: mod_base = OTHER; note = Uracil
  modified_base 14: mod_base = OTHER; note = Uracil
  modified_base 27: mod_base = OTHER; note = Uracil
  modified_base 30..31: mod_base = OTHER; note = Uracil
  modified_base 34: mod_base = OTHER; note = Uracil
  modified_base 37: mod_base = OTHER; note = Uracil
  modified_base 45: mod_base = OTHER; note = Uracil
  modified_base 48: mod_base = OTHER; note = Uracil
  modified_base 54..55: mod_base = OTHER; note = Uracil
  modified_base 68: mod_base = OTHER; note = Uracil
  modified_base 72: mod_base = OTHER; note = Uracil
  modified_base 78: mod_base = OTHER; note = Uracil

SEQ ID NO: 352 - DNA, 85 bp, synthetic construct
  misc_feature 1..85: note = Synthetic Polynucleotide
  source 1..85: mol_type = other DNA
  modified_base 9: mod_base = OTHER; note = Uracil
  modified_base 14: mod_base = OTHER; note = Uracil
  modified_base 22: mod_base = OTHER; note = Uracil
  modified_base 24: mod_base = OTHER; note = Uracil
  modified_base 28: mod_base = OTHER; note = Uracil
  modified_base 30: mod_base = OTHER; note = Uracil
  modified_base 33: mod_base = OTHER; note = Uracil
  modified_base 38: mod_base = OTHER; note = Uracil
  modified_base 49: mod_base = OTHER; note = Uracil
  modified_base 51: mod_base = OTHER; note = Uracil
  modified_base 53: mod_base = OTHER; note = Uracil
  modified_base 57: mod_base = OTHER; note = Uracil
  modified_base 69: mod_base = OTHER; note = Uracil
  modified_base 73: mod_base = OTHER; note = Uracil
  modified_base 79: mod_base = OTHER; note = Uracil
ggaggagctacgatgcggccgtctcgctctcatcccatgcacgaaacctctctcagtgcacagacgactcgctgaggatccgaca

SEQ ID NO: 353 - DNA, 87 bp, synthetic construct
  misc_feature 1..87: note = Synthetic Polynucleotide
  source 1..87: mol_type = other DNA
  modified_base 9: mod_base = OTHER; note = Uracil
  modified_base 14: mod_base = OTHER; note = Uracil
  modified_base 19: mod_base = OTHER; note = Uracil
  modified_base 22..23: mod_base = OTHER; note = Uracil
  modified_base 25: mod_base = OTHER; note = Uracil
  modified_base 33: mod_base = OTHER; note = Uracil
  modified_base 45: mod_base = OTHER; note = Uracil
  modified_base 47: mod_base = OTHER; note = Uracil
  modified_base 51..52: mod_base = OTHER; note = Uracil
  modified_base 54..55: mod_base = OTHER; note = Uracil
  modified_base 62: mod_base = OTHER; note = Uracil
  modified_base 71: mod_base = OTHER; note = Uracil
  modified_base 75: mod_base = OTHER; note = Uracil
  modified_base 81: mod_base = OTHER; note = Uracil
ggaggagctacgatgcggtaattctcagggggtgcggaacgggatatggattgttcgccagtcagacgactcgctgaggatccgaca

SEQ ID NO: 354 - DNA, 87 bp, synthetic construct
  misc_feature 1..87: note = Synthetic Polynucleotide
  source 1..87: mol_type = other DNA
  modified_base 9: mod_base = OTHER; note = Uracil
  modified_base 14: mod_base = OTHER; note = Uracil
  modified_base 19: mod_base = OTHER; note = Uracil
  modified_base 22..23: mod_base = OTHER; note = Uracil
  modified_base 25: mod_base = OTHER; note = Uracil
  modified_base 33: mod_base = OTHER; note = Uracil
  modified_base 47: mod_base = OTHER; note = Uracil
  modified_base 51..52: mod_base = OTHER; note = Uracil
  modified_base 54..55: mod_base = OTHER; note = Uracil
  modified_base 62: mod_base = OTHER; note = Uracil
  modified_base 71: mod_base = OTHER; note = Uracil
  modified_base 75: mod_base = OTHER; note = Uracil
  modified_base 81: mod_base = OTHER; note = Uracil
ggaggagctacgatgcggtaattctcaggaggtgcggaacgggacatggattgttcgccagtcagacgactcgctgaggatccgaca

SEQ ID NO: 355 - DNA, 87 bp, synthetic construct
  misc_feature 1..87: note = Synthetic Polynucleotide
  source 1..87: mol_type = other DNA
  modified_base 9: mod_base = OTHER; note = Uracil
  modified_base 14: mod_base = OTHER; note = Uracil
  modified_base 19: mod_base = OTHER; note = Uracil
  modified_base 22..23: mod_base = OTHER; note = Uracil
  modified_base 25: mod_base = OTHER; note = Uracil
  modified_base 33: mod_base = OTHER; note = Uracil
  modified_base 45: mod_base = OTHER; note = Uracil
  modified_base 47: mod_base = OTHER; note = Uracil
  modified_base 51..52: mod_base = OTHER; note = Uracil
  modified_base 54..55: mod_base = OTHER; note = Uracil
  modified_base 62: mod_base = OTHER; note = Uracil
  modified_base 71: mod_base = OTHER; note = Uracil
  modified_base 75: mod_base = OTHER; note = Uracil
  modified_base 81: mod_base = OTHER; note = Uracil
ggaggagctacgatgcggtaattctcaggaggtgcggaacgagatatggattgttcgccagtcagacgactcgctgaggatccgaca

SEQ ID NO: 356 - DNA, 87 bp, synthetic construct
  misc_feature 1..87: note = Synthetic Polynucleotide
  source 1..87: mol_type = other DNA
  modified_base 9: mod_base = OTHER; note = Uracil
  modified_base 14: mod_base = OTHER; note = Uracil
  modified_base 19: mod_base = OTHER; note = Uracil
  modified_base 22..23: mod_base = OTHER; note = Uracil
  modified_base 25: mod_base = OTHER; note = Uracil
  modified_base 33: mod_base = OTHER; note = Uracil
  modified_base 45: mod_base = OTHER; note = Uracil
  modified_base 47: mod_base = OTHER; note = Uracil
  modified_base 51..52: mod_base = OTHER; note = Uracil
  modified_base 54..55: mod_base = OTHER; note = Uracil
  modified_base 62: mod_base = OTHER; note = Uracil
  modified_base 71: mod_base = OTHER; note = Uracil
  modified_base 75: mod_base = OTHER; note = Uracil
  modified_base 81: mod_base = OTHER; note = Uracil
ggaggagctacgatgcggtaattctcaggaggtgcggaacgggatatgaattgttcgccagtcagacgactcgctgaggatccgaca

SEQ ID NO: 357 - DNA, 87 bp, synthetic construct
  misc_feature 1..87: note = Synthetic Polynucleotide
  source 1..87: mol_type = other DNA
  modified_base 9: mod_base = OTHER; note = Uracil
  modified_base 14: mod_base = OTHER; note = Uracil
  modified_base 19: mod_base = OTHER; note = Uracil
  modified_base 22..23: mod_base = OTHER; note = Uracil
  modified_base 25: mod_base = OTHER; note = Uracil
  modified_base 33: mod_base = OTHER; note = Uracil
  modified_base 45: mod_base = OTHER; note = Uracil
  modified_base 47: mod_base = OTHER; note = Uracil
  modified_base 51..52: mod_base = OTHER; note = Uracil
  modified_base 54..55: mod_base = OTHER; note = Uracil
  modified_base 62: mod_base = OTHER; note = Uracil
  modified_base 71: mod_base = OTHER; note = Uracil
  modified_base 75: mod_base = OTHER; note = Uracil
  modified_base 81: mod_base = OTHER; note = Uracil
ggaggagctacgatgcggtaattctcaggaagtgcggaacgggatatggattgttcgccagtcagacgactcgctgaggatccgaca

SEQ ID NO: 358 - DNA, 86 bp, synthetic construct
  misc_feature 1..86: note = Synthetic Polynucleotide
  source 1..86: mol_type = other DNA
  modified_base 9: mod_base = OTHER; note = Uracil
  modified_base 14: mod_base = OTHER; note = Uracil
  modified_base 23: mod_base = OTHER; note = Uracil
  modified_base 27: mod_base = OTHER; note = Uracil
  modified_base 34: mod_base = OTHER; note = Uracil
  modified_base 36: mod_base = OTHER; note = Uracil
  modified_base 47: mod_base = OTHER; note = Uracil
  modified_base 50..51: mod_base = OTHER; note = Uracil
  modified_base 53..55: mod_base = OTHER; note = Uracil
  modified_base 61: mod_base = OTHER; note = Uracil
  modified_base 70: mod_base = OTHER; note = Uracil
  modified_base 74: mod_base = OTHER; note = Uracil
  modified_base 80: mod_base = OTHER; note = Uracil
ggaggagctacgatgcggcccatcactcccgcgtatggcgaacgcatcgttatttagccgtcagacgactcgctgaggatccgaca

SEQ ID NO: 359 - DNA, 87 bp, synthetic construct
  misc_feature 1..87: note = Synthetic Polynucleotide
  source 1..87: mol_type = other DNA
  modified_base 9: mod_base = OTHER; note = Uracil
  modified_base 14: mod_base = OTHER; note = Uracil
  modified_base 19: mod_base = OTHER; note = Uracil
  modified_base 22: mod_base = OTHER; note = Uracil
  modified_base 26..27: mod_base = OTHER; note = Uracil
  modified_base 30..31: mod_base = OTHER; note = Uracil
  modified_base 40: mod_base = OTHER; note = Uracil
  modified_base 45: mod_base = OTHER; note = Uracil
  modified_base 48: mod_base = OTHER; note = Uracil
  modified_base 50: mod_base = OTHER; note = Uracil
  modified_base 52: mod_base = OTHER; note = Uracil
  modified_base 71: mod_base = OTHER; note = Uracil
  modified_base 75: mod_base = OTHER; note = Uracil
  modified_base 81: mod_base = OTHER; note = Uracil
ggaggagctacgatgcggtcatggattcattacaggaggtgcggtgctatatgcacgccagacagacgactcgctgaggatccgaca

SEQ ID NO: 360 - DNA, 86 bp, synthetic construct; identical to SEQ ID NO: 155
  misc_feature 1..86: note = Synthetic Polynucleotide
  source 1..86: mol_type = other DNA
  modified_base 9: mod_base = OTHER; note = Uracil
  modified_base 14: mod_base = OTHER; note = Uracil
  modified_base 29..31: mod_base = OTHER; note = Uracil
  modified_base 39..40: mod_base = OTHER; note = Uracil
  modified_base 57: mod_base = OTHER; note = Uracil
  modified_base 70: mod_base = OTHER; note = Uracil
  modified_base 74: mod_base = OTHER; note = Uracil
  modified_base 80: mod_base = OTHER; note = Uracil

SEQ ID NO: 361 - DNA, 87 bp, synthetic construct
  misc_feature 1..87: note = Synthetic Polynucleotide
  source 1..87: mol_type = other DNA
  modified_base 9: mod_base = OTHER; note = Uracil
  modified_base 14: mod_base = OTHER; note = Uracil
  modified_base 21: mod_base = OTHER; note = Uracil
  modified_base 24: mod_base = OTHER; note = Uracil
  modified_base 34: mod_base = OTHER; note = Uracil
  modified_base 37: mod_base = OTHER; note = Uracil
  modified_base 39..41: mod_base = OTHER; note = Uracil
  modified_base 54: mod_base = OTHER; note = Uracil
  modified_base 71: mod_base = OTHER; note = Uracil
  modified_base 75: mod_base = OTHER; note = Uracil
  modified_base 81: mod_base = OTHER; note = Uracil
ggaggagctacgatgcggcctagtacaaaagcctgatctttgggaaccgaccctaggacagacagacgactcgctgaggatccgaca

SEQ ID NO: 362 - DNA, 87 bp, synthetic construct
  misc_feature 1..87: note = Synthetic Polynucleotide
  source 1..87: mol_type = other DNA
  modified_base 9: mod_base = OTHER; note = Uracil
  modified_base 14: mod_base = OTHER; note = Uracil
  modified_base 20..21: mod_base = OTHER; note = Uracil
  modified_base 27: mod_base = OTHER; note = Uracil
  modified_base 33..35: mod_base = OTHER; note = Uracil
  modified_base 37: mod_base = OTHER; note = Uracil
  modified_base 49: mod_base = OTHER; note = Uracil
  modified_base 51..52: mod_base = OTHER; note = Uracil
  modified_base 54: mod_base = OTHER; note = Uracil
  modified_base 56..57: mod_base = OTHER; note = Uracil
  modified_base 71: mod_base = OTHER; note = Uracil
  modified_base 75: mod_base = OTHER; note = Uracil
  modified_base 81: mod_base = OTHER; note = Uracil
ggaggagctacgatgcggcttacagctcaccatttatgggaggcccggtgttgtgttccagacagacgactcgctgaggatccgaca

SEQ ID NO: 363 - DNA, 87 bp, synthetic construct; identical to SEQ ID NO: 163
  misc_feature 1..87: note = Synthetic Polynucleotide
  source 1..87: mol_type = other DNA
  modified_base 9: mod_base = OTHER; note = Uracil
  modified_base 14: mod_base = OTHER; note = Uracil
  modified_base 20..21: mod_base = OTHER; note = Uracil
  modified_base 23..24: mod_base = OTHER; note = Uracil
  modified_base 26..28: mod_base = OTHER; note = Uracil
  modified_base 33: mod_base = OTHER; note = Uracil
  modified_base 35..36: mod_base = OTHER; note = Uracil
  modified_base 42: mod_base = OTHER; note = Uracil
  modified_base 47..48: mod_base = OTHER; note = Uracil
  modified_base 71: mod_base = OTHER; note = Uracil
  modified_base 75: mod_base = OTHER; note = Uracil
  modified_base 81: mod_base = OTHER; note = Uracil

SEQ ID NO: 364 - DNA, 87 bp, synthetic construct
  misc_feature 1..87: note = Synthetic Polynucleotide
  source 1..87: mol_type = other DNA
  modified_base 9: mod_base = OTHER; note = Uracil
  modified_base 14: mod_base = OTHER; note = Uracil
  modified_base 25..26: mod_base = OTHER; note = Uracil
  modified_base 29: mod_base = OTHER; note = Uracil
  modified_base 36: mod_base = OTHER; note = Uracil
  modified_base 40: mod_base = OTHER; note = Uracil
  modified_base 49: mod_base = OTHER; note = Uracil
  modified_base 53: mod_base = OTHER; note = Uracil
  modified_base 56: mod_base = OTHER; note = Uracil
  modified_base 71: mod_base = OTHER; note = Uracil
  modified_base 75: mod_base = OTHER; note = Uracil
  modified_base 81: mod_base = OTHER; note = Uracil
ggaggagctacgatgcggaacagcttaatcgccagtcgatacgcgccatacatcatcacagacagacgactcgctgaggatccgaca

SEQ ID NO: 365 - DNA, 87 bp, synthetic construct
  misc_feature 1..87: note = Synthetic Polynucleotide
  source 1..87: mol_type = other DNA
  modified_base 9: mod_base = OTHER; note = Uracil
  modified_base 14: mod_base = OTHER; note = Uracil
  modified_base 19: mod_base = OTHER; note = Uracil
  modified_base 22..23: mod_base = OTHER; note = Uracil
  modified_base 25: mod_base = OTHER; note = Uracil
  modified_base 33: mod_base = OTHER; note = Uracil
  modified_base 45: mod_base = OTHER; note = Uracil
  modified_base 47: mod_base = OTHER; note = Uracil
  modified_base 51..52: mod_base = OTHER; note = Uracil
  modified_base 54..55: mod_base = OTHER; note = Uracil
  modified_base 62: mod_base = OTHER; note = Uracil
  modified_base 71: mod_base = OTHER; note = Uracil
  modified_base 75: mod_base = OTHER; note = Uracil
  modified_base 81: mod_base = OTHER; note = Uracil
ggaggagctacgatgcggtaattctcaggagatgcggaacgggatatggattgttcgccagtcagacgactcgctgaggatccgaca

SEQ ID NO: 366 - DNA, 87 bp, synthetic construct
  misc_feature 1..87: note = Synthetic Polynucleotide
  source 1..87: mol_type = other DNA
  modified_base 9: mod_base = OTHER; note = Uracil
  modified_base 14: mod_base = OTHER; note = Uracil
  modified_base 19: mod_base = OTHER; note = Uracil
  modified_base 22..23: mod_base = OTHER; note = Uracil
  modified_base 25: mod_base = OTHER; note = Uracil
  modified_base 33: mod_base = OTHER; note = Uracil
  modified_base 45: mod_base = OTHER; note = Uracil
  modified_base 47: mod_base = OTHER; note = Uracil
  modified_base 51..52: mod_base = OTHER; note = Uracil
  modified_base 54..55: mod_base = OTHER; note = Uracil
  modified_base 62: mod_base = OTHER; note = Uracil
  modified_base 71: mod_base = OTHER; note = Uracil
  modified_base 75: mod_base = OTHER; note = Uracil
  modified_base 81: mod_base = OTHER; note = Uracil
ggaggagctacgatgcggtaattctcaggaggtgcgaaacgggatatggattgttcgccagtcagacgactcgctgaggatccgaca

SEQ ID NO: 367 - DNA, 86 bp, synthetic construct
  misc_feature 1..86: note = Synthetic Polynucleotide
  source 1..86: mol_type = other DNA
  modified_base 9: mod_base = OTHER; note = Uracil
  modified_base 14: mod_base = OTHER; note = Uracil
  modified_base 23..25: mod_base = OTHER; note = Uracil
  modified_base 28: mod_base = OTHER; note = Uracil
  modified_base 31: mod_base = OTHER; note = Uracil
  modified_base 34: mod_base = OTHER; note = Uracil
  modified_base 38: mod_base = OTHER; note = Uracil
  modified_base 43: mod_base = OTHER; note = Uracil
  modified_base 48..49: mod_base = OTHER; note = Uracil
  modified_base 54..55: mod_base = OTHER; note = Uracil
  modified_base 61: mod_base = OTHER; note = Uracil
  modified_base 70: mod_base = OTHER; note = Uracil
  modified_base 74: mod_base = OTHER; note = Uracil
  modified_base 80: mod_base = OTHER; note = Uracil
ggaggagctacgatgcggacgatttcgtcatcctccataccatcgccttaccgttcagcgtcagacgactcgctgaggatccgaca

SEQ ID NO: 368 - DNA, 87 bp, synthetic construct; identical to SEQ ID NO: 72
  misc_feature 1..87: note = Synthetic Polynucleotide
  source 1..87: mol_type = other DNA
  modified_base 9: mod_base = OTHER; note = Uracil
  modified_base 14: mod_base = OTHER; note = Uracil
  modified_base 27: mod_base = OTHER; note = Uracil
  modified_base 30: mod_base = OTHER; note = Uracil
  modified_base 50: mod_base = OTHER; note = Uracil
  modified_base 54: mod_base = OTHER; note = Uracil
  modified_base 56: mod_base = OTHER; note = Uracil
  modified_base 71: mod_base = OTHER; note = Uracil
  modified_base 75: mod_base = OTHER; note = Uracil
  modified_base 81: mod_base = OTHER; note = Uracil

SEQ ID NO: 369 - DNA, 92 bp, synthetic construct
  misc_feature 1..92: note = Synthetic Polynucleotide
  source 1..92: mol_type = other DNA
  modified_base 9: mod_base = OTHER; note = Uracil
  modified_base 14: mod_base = OTHER; note = Uracil
  modified_base 19..20: mod_base = OTHER; note = Uracil
  modified_base 22: mod_base = OTHER; note = Uracil
  modified_base 26..28: mod_base = OTHER; note = Uracil
  modified_base 32: mod_base = OTHER; note = Uracil
  modified_base 35..36: mod_base = OTHER; note = Uracil
  modified_base 43..44: mod_base = OTHER; note = Uracil
  modified_base 49: mod_base = OTHER; note = Uracil
  modified_base 67: mod_base = OTHER; note = Uracil
  modified_base 76: mod_base = OTHER; note = Uracil
  modified_base 80: mod_base = OTHER; note = Uracil
  modified_base 86: mod_base = OTHER; note = Uracil
ggaggagctacgatgcggttatgcgtttaagtcattgacgcgttacactggagggggccagacgactcagacgactcgctgaggatccgaca

SEQ ID NO: 370 - DNA, 84 bp, synthetic construct; identical to SEQ ID NO: 246
  misc_feature 1..84: note = Synthetic Polynucleotide
  source 1..84: mol_type = other DNA
  modified_base 9: mod_base = OTHER; note = Uracil
  modified_base 14: mod_base = OTHER; note = Uracil
  modified_base 27: mod_base = OTHER; note = Uracil
  modified_base 30..31: mod_base = OTHER; note = Uracil
  modified_base 34: mod_base = OTHER; note = Uracil
  modified_base 37: mod_base = OTHER; note = Uracil
  modified_base 45: mod_base = OTHER; note = Uracil
  modified_base 54..55: mod_base = OTHER; note = Uracil
  modified_base 68: mod_base = OTHER; note = Uracil
  modified_base 72: mod_base = OTHER; note = Uracil
  modified_base 78: mod_base = OTHER; note = Uracil

SEQ ID NO: 371 - DNA, 87 bp, synthetic construct
  misc_feature 1..87: note = Synthetic Polynucleotide
  source 1..87: mol_type = other DNA
  modified_base 9: mod_base = OTHER; note = Uracil
  modified_base 14: mod_base = OTHER; note = Uracil
  modified_base 20..21: mod_base = OTHER; note = Uracil
  modified_base 27: mod_base = OTHER; note = Uracil
  modified_base 33..37: mod_base = OTHER; note = Uracil
  modified_base 49: mod_base = OTHER; note = Uracil
  modified_base 51..52: mod_base = OTHER; note = Uracil
  modified_base 54: mod_base = OTHER; note = Uracil
  modified_base 56..57: mod_base = OTHER; note = Uracil
  modified_base 71: mod_base = OTHER; note = Uracil
  modified_base 75: mod_base = OTHER; note = Uracil
  modified_base 81: mod_base = OTHER; note = Uracil
ggaggagctacgatgcggcttacagctcaccatttttgggaggcccggtgttgtgttccagacagacgactcgctgaggatccgaca

SEQ ID NO: 372 - DNA, 85 bp, synthetic construct; identical to SEQ ID NO: 140
  misc_feature 1..85: note = Synthetic Polynucleotide
  source 1..85: mol_type = other DNA
  modified_base 9: mod_base = OTHER; note = Uracil
  modified_base 14: mod_base = OTHER; note = Uracil
  modified_base 28: mod_base = OTHER; note = Uracil
  modified_base 31..32: mod_base = OTHER; note = Uracil
  modified_base 35: mod_base = OTHER; note = Uracil
  modified_base 38: mod_base = OTHER; note = Uracil
  modified_base 46: mod_base = OTHER; note = Uracil
  modified_base 55..56: mod_base = OTHER; note = Uracil
  modified_base 69: mod_base = OTHER; note = Uracil
  modified_base 73: mod_base = OTHER; note = Uracil
  modified_base 79: mod_base = OTHER; note = Uracil

SEQ ID NO: 373 - DNA, 87 bp, synthetic construct
  misc_feature 1..87: note = Synthetic Polynucleotide
  source 1..87: mol_type = other DNA
  modified_base 9: mod_base = OTHER; note = Uracil
  modified_base 14: mod_base = OTHER; note = Uracil
  modified_base 19: mod_base = OTHER; note = Uracil
  modified_base 22..23: mod_base = OTHER; note = Uracil
  modified_base 25: mod_base = OTHER; note = Uracil
  modified_base 33: mod_base = OTHER; note = Uracil
  modified_base 45: mod_base = OTHER; note = Uracil
  modified_base 47: mod_base = OTHER; note = Uracil
  modified_base 51..52: mod_base = OTHER; note = Uracil
  modified_base 54..55: mod_base = OTHER; note = Uracil
  modified_base 62: mod_base = OTHER; note = Uracil
  modified_base 71: mod_base = OTHER; note = Uracil
  modified_base 75: mod_base = OTHER; note = Uracil
  modified_base 81: mod_base = OTHER; note = Uracil
ggaggagctacgatgcggtaattctcaggaggtgcggaacgggatatagattgttcgccagtcagacgactcgctgaggatccgaca

SEQ ID NO: 374 - DNA, 87 bp, synthetic construct
  misc_feature 1..87: note = Synthetic Polynucleotide
  source 1..87: mol_type = other DNA
  modified_base 9: mod_base = OTHER; note = Uracil
  modified_base 14: mod_base = OTHER; note = Uracil
  modified_base 19: mod_base = OTHER; note = Uracil
  modified_base 22..23: mod_base = OTHER; note = Uracil
  modified_base 25: mod_base = OTHER; note = Uracil
  modified_base 33: mod_base = OTHER; note = Uracil
  modified_base 45: mod_base = OTHER; note = Uracil
  modified_base 47: mod_base = OTHER; note = Uracil
  modified_base 51..52: mod_base = OTHER; note = Uracil
  modified_base 54..55: mod_base = OTHER; note = Uracil
  modified_base 62: mod_base = OTHER; note = Uracil
  modified_base 71: mod_base = OTHER; note = Uracil
  modified_base 75: mod_base = OTHER; note = Uracil
  modified_base 81: mod_base = OTHER; note = Uracil
ggaggagctacgatgcggtaattctcagaaggtgcggaacgggatatggattgttcgccagtcagacgactcgctgaggatccgaca

SEQ ID NO: 375 - DNA, 87 bp, synthetic construct
  misc_feature 1..87: note = Synthetic Polynucleotide
  source 1..87: mol_type = other DNA
  modified_base 9: mod_base = OTHER; note = Uracil
  modified_base 14: mod_base = OTHER; note = Uracil
  modified_base 19: mod_base = OTHER; note = Uracil
  modified_base 22..23: mod_base = OTHER; note = Uracil
  modified_base 25: mod_base = OTHER; note = Uracil
  modified_base 33: mod_base = OTHER; note = Uracil
  modified_base 45: mod_base = OTHER; note = Uracil
  modified_base 47: mod_base = OTHER; note = Uracil
  modified_base 51..52: mod_base = OTHER; note = Uracil
  modified_base 54..55: mod_base = OTHER; note = Uracil
  modified_base 62: mod_base = OTHER; note = Uracil
  modified_base 71: mod_base = OTHER; note = Uracil
  modified_base 75: mod_base = OTHER; note = Uracil
  modified_base 81: mod_base = OTHER; note = Uracil
ggaggagctacgatgcggtaattctcaggaggtgcggaacgggatatggattgttcgcccgtcagacgactcgctgaggatccgaca

SEQ ID NO: 376 - DNA, 87 bp, synthetic construct
  misc_feature 1..87: note = Synthetic Polynucleotide
  source 1..87: mol_type = other DNA
  modified_base 9: mod_base = OTHER; note = Uracil
  modified_base 14: mod_base = OTHER; note = Uracil
  modified_base 19: mod_base = OTHER; note = Uracil
  modified_base 22..23: mod_base = OTHER; note = Uracil
  modified_base 25: mod_base = OTHER; note = Uracil
  modified_base 33: mod_base = OTHER; note = Uracil
  modified_base 45: mod_base = OTHER; note = Uracil
  modified_base 47: mod_base = OTHER; note = Uracil
  modified_base 51..52: mod_base = OTHER; note = Uracil
  modified_base 54..55: mod_base = OTHER; note = Uracil
  modified_base 62: mod_base = OTHER; note = Uracil
  modified_base 71: mod_base = OTHER; note = Uracil
  modified_base 75: mod_base = OTHER; note = Uracil
  modified_base 81: mod_base = OTHER; note = Uracil
ggaggagctacgatgcggtaattctcaagaggtgcggaacgggatatggattgttcgccagtcagacgactcgctgaggatccgaca

SEQ ID NO: 377 - DNA, 88 bp, synthetic construct; identical to SEQ ID NO: 141
  misc_feature 1..88: note = Synthetic Polynucleotide
  source 1..88: mol_type = other DNA
  modified_base 9: mod_base = OTHER; note = Uracil
  modified_base 14: mod_base = OTHER; note = Uracil
  modified_base 26: mod_base = OTHER; note = Uracil
  modified_base 29: mod_base = OTHER; note = Uracil
  modified_base 46..48: mod_base = OTHER; note = Uracil
  modified_base 54: mod_base = OTHER; note = Uracil
  modified_base 72: mod_base = OTHER; note = Uracil
  modified_base 76: mod_base = OTHER; note = Uracil
  modified_base 82: mod_base = OTHER; note = Uracil

SEQ ID NO: 378 - DNA, 84 bp, synthetic construct
  misc_feature 1..84: note = Synthetic Polynucleotide
  source 1..84: mol_type = other DNA
  modified_base 9: mod_base = OTHER; note = Uracil
  modified_base 14: mod_base = OTHER; note = Uracil
  modified_base 19: mod_base = OTHER; note = Uracil
  modified_base 27: mod_base = OTHER; note = Uracil
  modified_base 30..31: mod_base = OTHER; note = Uracil
  modified_base 34: mod_base = OTHER; note = Uracil
  modified_base 37: mod_base = OTHER; note = Uracil
  modified_base 45: mod_base = OTHER; note = Uracil
  modified_base 54..55: mod_base = OTHER; note = Uracil
  modified_base 68: mod_base = OTHER; note = Uracil
  modified_base 72: mod_base = OTHER; note = Uracil
  modified_base 78: mod_base = OTHER; note = Uracil
ggaggagctacgatgcggtcggaggatagttgctaatcgagccctgccgacgcttcagacagacgactcgctgaggatccgaca

SEQ ID NO: 379 - DNA, 87 bp, synthetic construct; identical to SEQ ID NO: 48
  misc_feature 1..87: note = Synthetic Polynucleotide
  source 1..87: mol_type = other DNA
  modified_base 9: mod_base = OTHER; note = Uracil
  modified_base 14: mod_base = OTHER; note = Uracil
  modified_base 19..20: mod_base = OTHER; note = Uracil
  modified_base 22: mod_base = OTHER; note = Uracil
  modified_base 26..28: mod_base = OTHER; note = Uracil
  modified_base 32: mod_base = OTHER; note = Uracil
  modified_base 35..36: mod_base = OTHER; note = Uracil
  modified_base 43..44: mod_base = OTHER; note = Uracil
  modified_base 49: mod_base = OTHER; note = Uracil
  modified_base 71: mod_base = OTHER; note = Uracil
  modified_base 75: mod_base = OTHER; note = Uracil
  modified_base 81: mod_base = OTHER; note = Uracil

SEQ ID NO: 380 - DNA, 89 bp, synthetic construct
  misc_feature 1..89: note = Synthetic Polynucleotide
  source 1..89: mol_type = other DNA
  modified_base 9: mod_base = OTHER; note = Uracil
  modified_base 14: mod_base = OTHER; note = Uracil
  modified_base 27: mod_base = OTHER; note = Uracil
  modified_base 30: mod_base = OTHER; note = Uracil
  modified_base 40: mod_base = OTHER; note = Uracil
  modified_base 47..49: mod_base = OTHER; note = Uracil
  modified_base 55: mod_base = OTHER; note = Uracil
  modified_base 73: mod_base = OTHER; note = Uracil
  modified_base 77: mod_base = OTHER; note = Uracil
  modified_base 83: mod_base = OTHER; note = Uracil
ggaggagctacgatgcggcaaaaaactgataaacacaggtccggcatttgagcgtacacccagacagacgactcgctgaggatccgaca

SEQ ID NO: 381 - DNA, 84 bp, synthetic construct; identical to SEQ ID NO: 89
  misc_feature 1..84: note = Synthetic Polynucleotide
  source 1..84: mol_type = other DNA
  modified_base 9: mod_base = OTHER; note = Uracil
  modified_base 14: mod_base = OTHER; note = Uracil
  modified_base 27: mod_base = OTHER; note = Uracil
  modified_base 30..31: mod_base = OTHER; note = Uracil
  modified_base 34: mod_base = OTHER; note = Uracil
  modified_base 37: mod_base = OTHER; note = Uracil
  modified_base 45: mod_base = OTHER; note = Uracil
  modified_base 54..55: mod_base = OTHER; note = Uracil
  modified_base 68: mod_base = OTHER; note = Uracil
  modified_base 72: mod_base = OTHER; note = Uracil
  modified_base 78: mod_base = OTHER; note = Uracil

SEQ ID NO: 382 - DNA, 21 bp, synthetic construct
  misc_feature 1..21: note = Synthetic Polynucleotide
  source 1..21: mol_type = other DNA
  modified_base 1: mod_base = OTHER; note = Uracil
  modified_base 5: mod_base = OTHER; note = Uracil
  modified_base 10..11: mod_base = OTHER; note = Uracil
  modified_base 14: mod_base = OTHER; note = Uracil
  modified_base 16: mod_base = OTHER; note = Uracil
  modified_base 18: mod_base = OTHER; note = Uracil
  modified_base 20..21: mod_base = OTHER; note = Uracil
tagctgaagttcatctctctt

SEQ ID NO: 383 - DNA, 21 bp, synthetic construct
  misc_feature 1..21: note = Synthetic Polynucleotide
  source 1..21: mol_type = other DNA
  modified_base 1..3: mod_base = OTHER; note = Uracil
  modified_base 9..10: mod_base = OTHER; note = Uracil
  modified_base 16: mod_base = OTHER; note = Uracil
  modified_base 19..21: mod_base = OTHER; note = Uracil
tttcagccttaaggatggttt

SEQ ID NO: 384 - DNA, 21 bp, synthetic construct
  misc_feature 1..21: note = Synthetic Polynucleotide
  source 1..21: mol_type = other DNA
  modified_base 1..3: mod_base = OTHER; note = Uracil
  modified_base 5..6: mod_base = OTHER; note = Uracil
  modified_base 8: mod_base = OTHER; note = Uracil
  modified_base 13..14: mod_base = OTHER; note = Uracil
  modified_base 18: mod_base = OTHER; note = Uracil
  modified_base 20..21: mod_base = OTHER; note = Uracil
tttattctccccttgggtgtt

SEQ ID NO: 385 - DNA, 21 bp, synthetic construct
  misc_feature 1..21: note = Synthetic Polynucleotide
  source 1..21: mol_type = other DNA
  modified_base 1: mod_base = OTHER; note = Uracil
  modified_base 4: mod_base = OTHER; note = Uracil
  modified_base 8: mod_base = OTHER; note = Uracil
  modified_base 10: mod_base = OTHER; note = Uracil
  modified_base 14: mod_base = OTHER; note = Uracil
  modified_base 16: mod_base = OTHER; note = Uracil
  modified_base 18: mod_base = OTHER; note = Uracil
  modified_base 20..21: mod_base = OTHER; note = Uracil
tactccctctgcctatgtgtt

SEQ ID NO: 386 - DNA, 21 bp, synthetic construct
  misc_feature 1..21: note = Synthetic Polynucleotide
  source 1..21: mol_type = other DNA
  modified_base 1..3: mod_base = OTHER; note = Uracil
  modified_base 6: mod_base = OTHER; note = Uracil
  modified_base 8..11: mod_base = OTHER; note = Uracil
  modified_base 15: mod_base = OTHER; note = Uracil
  modified_base 20..21: mod_base = OTHER; note = Uracil
tttactgttttggctgggctt

SEQ ID NO: 387 - DNA, 21 bp, synthetic construct
  misc_feature 1..21: note = Synthetic Polynucleotide
  source 1..21: mol_type = other DNA
  modified_base 5: mod_base = OTHER; note = Uracil
  modified_base 8: mod_base = OTHER; note = Uracil
  modified_base 11: mod_base = OTHER; note = Uracil
  modified_base 14: mod_base = OTHER; note = Uracil
  modified_base 19..21: mod_base = OTHER; note = Uracil
aaaatgctggtcatacccttt

SEQ ID NO: 388 - DNA, 21 bp, synthetic construct
  misc_feature 1..21: note = Synthetic Polynucleotide
  source 1..21: mol_type = other DNA
  modified_base 1..2: mod_base = OTHER; note = Uracil
  modified_base 4..5: mod_base = OTHER; note = Uracil
  modified_base 11: mod_base = OTHER; note = Uracil
  modified_base 14: mod_base = OTHER; note = Uracil
  modified_base 18: mod_base = OTHER; note = Uracil
  modified_base 20..21: mod_base = OTHER; note = Uracil
ttgttcaaactactccctctt

SEQ ID NO: 389 - DNA, 21 bp, synthetic construct
  misc_feature 1..21: note = Synthetic Polynucleotide
  source 1..21: mol_type = other DNA
  modified_base 1..4: mod_base = OTHER; note = Uracil
  modified_base 7: mod_base = OTHER; note = Uracil
  modified_base 11..12: mod_base = OTHER; note = Uracil
  modified_base 17: mod_base = OTHER; note = Uracil
  modified_base 20..21: mod_base = OTHER; note = Uracil
ttttcctgccttccgctaatt

SEQ ID NO: 390 - DNA, 21 bp, synthetic construct
  misc_feature 1..21: note = Synthetic Polynucleotide
  source 1..21: mol_type = other DNA
  modified_base 1..2: mod_base = OTHER; note = Uracil
  modified_base 9: mod_base = OTHER; note = Uracil
  modified_base 12: mod_base = OTHER; note = Uracil
  modified_base 14: mod_base = OTHER; note = Uracil
  modified_base 17: mod_base = OTHER; note = Uracil
  modified_base 20..21: mod_base = OTHER; note = Uracil
ttacagggtaatgtggtgatt

SEQ ID NO: 391 - DNA, 21 bp, synthetic construct
  misc_feature 1..21: note = Synthetic Polynucleotide
  source 1..21: mol_type = other DNA
  modified_base 3..4: mod_base = OTHER; note = Uracil
  modified_base 11: mod_base = OTHER; note = Uracil
  modified_base 20..21: mod_base = OTHER; note = Uracil
gattgggaggtgaagggaatt

SEQ ID NO: 392 - DNA, 21 bp, synthetic construct
  misc_feature 1..21: note = Synthetic Polynucleotide
  source 1..21: mol_type = other DNA
  modified_base 3: mod_base = OTHER; note = Uracil
  modified_base 6: mod_base = OTHER; note = Uracil
  modified_base 9: mod_base = OTHER; note = Uracil
  modified_base 12: mod_base = OTHER; note = Uracil
  modified_base 17: mod_base = OTHER; note = Uracil
  modified_base 20..21: mod_base = OTHER; note = Uracil
aatgctggtcataccctggtt

SEQ ID NO: 393 - DNA, 21 bp, synthetic construct
  misc_feature 1..21: note = Synthetic Polynucleotide
  source 1..21: mol_type = other DNA
  modified_base 1: mod_base = OTHER; note = Uracil
  modified_base 8: mod_base = OTHER; note = Uracil
  modified_base 10: mod_base = OTHER; note = Uracil
  modified_base 13: mod_base = OTHER; note = Uracil
  modified_base 16: mod_base = OTHER; note = Uracil
  modified_base 20..21: mod_base = OTHER; note = Uracil
tacaagatatgatcctccctt

SEQ ID NO: 394 - DNA, 21 bp, synthetic construct
  misc_feature 1..21: note = Synthetic Polynucleotide
  source 1..21: mol_type = other DNA
  modified_base 1..3: mod_base = OTHER; note = Uracil
  modified_base 5: mod_base = OTHER; note = Uracil
  modified_base 16: mod_base = OTHER; note = Uracil
  modified_base 20..21: mod_base = OTHER; note = Uracil
tttatcagaaaggcgtccctt

SEQ ID NO: 395 - DNA, 21 bp, synthetic construct
  misc_feature 1..21: note = Synthetic Polynucleotide
  source 1..21: mol_type = other DNA
  modified_base 1..2: mod_base = OTHER; note = Uracil
  modified_base 8: mod_base = OTHER; note = Uracil
  modified_base 18: mod_base = OTHER; note = Uracil
  modified_base 20..21: mod_base = OTHER; note = Uracil
ttaaggctgcggaagcctatt

SEQ ID NO: 396 - DNA, 21 bp, synthetic construct
  misc_feature 1..21: note = Synthetic Polynucleotide
  source 1..21: mol_type = other DNA
  modified_base 1..2: mod_base = OTHER; note = Uracil
  modified_base 7: mod_base = OTHER; note = Uracil
  modified_base 12: mod_base = OTHER; note = Uracil
  modified_base 15: mod_base = OTHER; note = Uracil
  modified_base 20..21: mod_base = OTHER; note = Uracil
ttgacctcaagtgatccgctt

SEQ ID NO: 397 - DNA, 21 bp, synthetic construct
  misc_feature 1..21: note = Synthetic Polynucleotide
  source 1..21: mol_type = other DNA
  modified_base 4..5: mod_base = OTHER; note = Uracil
  modified_base 8: mod_base = OTHER; note = Uracil
  modified_base 14..15: mod_base = OTHER; note = Uracil
  modified_base 18: mod_base = OTHER; note = Uracil
  modified_base 20..21: mod_base = OTHER; note = Uracil
gacttcctcaaagttcctctt

SEQ ID NO: 398 - DNA, 21 bp, synthetic construct
  misc_feature 1..21: note = Synthetic Polynucleotide
  source 1..21: mol_type = other DNA
  modified_base 1: mod_base = OTHER; note = Uracil
  modified_base 7: mod_base = OTHER; note = Uracil
  modified_base 17: mod_base = OTHER; note = Uracil
  modified_base 19..21: mod_base = OTHER; note = Uracil
taaggctgcggaagcctattt

SEQ ID NO: 399 - DNA, 21 bp, synthetic construct
  misc_feature 1..21: note = Synthetic Polynucleotide
  source 1..21: mol_type = other DNA
  modified_base 1: mod_base = OTHER; note = Uracil
  modified_base 8: mod_base = OTHER; note = Uracil
  modified_base 20..21: mod_base = OTHER; note = Uracil
taaaaagtcagcagcagactt

SEQ ID NO: 400 - DNA, 21 bp, synthetic construct
  misc_feature 1..21: note = Synthetic Polynucleotide
  source 1..21: mol_type = other DNA
  modified_base 4: mod_base = OTHER; note = Uracil
  modified_base 19..21: mod_base = OTHER; note = Uracil
aagtcagcagcagacccattt

SEQ ID NO: 401 - DNA, 21 bp, synthetic construct
  misc_feature 1..21: note = Synthetic Polynucleotide
  source 1..21: mol_type = other DNA
  modified_base 2: mod_base = OTHER; note = Uracil
  modified_base 8..9: mod_base = OTHER; note = Uracil
  modified_base 20..21: mod_base = OTHER; note = Uracil
gtgagggttaagaaagccctt

SEQ ID NO: 402 - DNA, 21 bp, synthetic construct
  misc_feature 1..21: note = Synthetic Polynucleotide
  source 1..21: mol_type = other DNA
  modified_base 2: mod_base = OTHER; note = Uracil
  modified_base 7..8: mod_base = OTHER; note = Uracil
  modified_base 14: mod_base = OTHER; note = Uracil
  modified_base 17: mod_base = OTHER; note = Uracil
  modified_base 20..21: mod_base = OTHER; note = Uracil
ctgcagttcaaaatactgctt

SEQ ID NO: 403 - DNA, 21 bp, synthetic construct
  misc_feature 1..21: note = Synthetic Polynucleotide
  source 1..21: mol_type = other DNA
  modified_base 1..3: mod_base = OTHER; note = Uracil
  modified_base 7..8: mod_base = OTHER; note = Uracil
  modified_base 11: mod_base = OTHER; note = Uracil
  modified_base 15: mod_base = OTHER; note = Uracil
  modified_base 20..21: mod_base = OTHER; note = Uracil
tttgggttagtgaatgggctt

SEQ ID NO: 404 - DNA, 21 bp, synthetic construct
  misc_feature 1..21: note = Synthetic Polynucleotide
  source 1..21: mol_type = other DNA
  modified_base 1..3: mod_base = OTHER; note = Uracil
  modified_base 6..7: mod_base = OTHER; note = Uracil
  modified_base 11: mod_base = OTHER; note = Uracil
  modified_base 13..14: mod_base = OTHER; note = Uracil
  modified_base 16: mod_base = OTHER; note = Uracil
  modified_base 20..21: mod_base = OTHER; note = Uracil
tttacttaagtattatccctt

SEQ ID NO: 405 - DNA, 21 bp, synthetic construct
  misc_feature 1..21: note = Synthetic Polynucleotide
  source 1..21: mol_type = other DNA
  modified_base 7: mod_base = OTHER; note = Uracil
  modified_base 9..10: mod_base = OTHER; note = Uracil
  modified_base 12: mod_base = OTHER; note = Uracil
  modified_base 16: mod_base = OTHER; note = Uracil
  modified_base 20..21: mod_base = OTHER; note = Uracil
gaagcctattctaggtgagtt

SEQ ID NO: 406 - DNA, 21 bp, synthetic construct
  misc_feature 1..21: note = Synthetic Polynucleotide
  source 1..21: mol_type = other DNA
  modified_base 5: mod_base = OTHER; note = Uracil
  modified_base 20..21: mod_base = OTHER; note = Uracil
aaagtcagcagcagacccatt

SEQ ID NO: 407 - DNA, 21 bp, synthetic construct
  misc_feature 1..21: note = Synthetic Polynucleotide
  source 1..21: mol_type = other DNA
  modified_base 6: mod_base = OTHER; note = Uracil
  modified_base 20..21: mod_base = OTHER; note = Uracil
aaaagtcagcagcagaccctt

SEQ ID NO: 408 - DNA, 21 bp, synthetic construct
  misc_feature 1..21: note = Synthetic Polynucleotide
  source 1..21: mol_type = other DNA
  modified_base 1: mod_base = OTHER; note = Uracil
  modified_base 7..8: mod_base = OTHER; note = Uracil
  modified_base 19..21: mod_base = OTHER; note = Uracil
tgagggttaagaaagcccttt

SEQ ID NO: 409 - DNA, 21 bp, synthetic construct
  misc_feature 1..21: note = Synthetic Polynucleotide
  source 1..21: mol_type = other DNA
  modified_base 2: mod_base = OTHER; note = Uracil
  modified_base 6: mod_base = OTHER; note = Uracil
  modified_base 9: mod_base = OTHER; note = Uracil
  modified_base 11: mod_base = OTHER; note = Uracil
  modified_base 13..15: mod_base = OTHER; note = Uracil
  modified_base 16: mod_base = OTHER; note = Uracil
  modified_base 18: mod_base = OTHER; note = Uracil
  modified_base 20..21: mod_base = OTHER; note = Uracil
ctaggtgctctcttttctctt

SEQ ID NO: 410 - DNA, 21 bp, synthetic construct
  misc_feature 1..21: note = Synthetic Polynucleotide
  source 1..21: mol_type = other DNA
  modified_base 2..4: mod_base = OTHER; note = Uracil
  modified_base 8..9: mod_base = OTHER; note = Uracil
  modified_base 12: mod_base = OTHER; note = Uracil
  modified_base 16: mod_base = OTHER; note = Uracil
  modified_base 20..21: mod_base = OTHER; note = Uracil
ctttgggttagtgaatgggtt

SEQ ID NO: 411 - DNA, 21 bp, synthetic construct
  misc_feature 1..21: note = Synthetic Polynucleotide
  source 1..21: mol_type = other DNA
  modified_base 1: mod_base = OTHER; note = Uracil
  modified_base 5..6: mod_base = OTHER; note = Uracil
  modified_base 9: mod_base = OTHER; note = Uracil
  modified_base 15..16: mod_base = OTHER; note = Uracil
  modified_base 19..21: mod_base = OTHER; note = Uracil
tgacttcctcaaagttccttt

SEQ ID NO: 412 - DNA, 21 bp, synthetic construct
  misc_feature 1..21: note = Synthetic Polynucleotide
  source 1..21: mol_type = other DNA
  modified_base 1: mod_base = OTHER; note = Uracil
  modified_base 2: mod_base = OTHER; note = Uracil
  modified_base 5: mod_base = OTHER; note = Uracil
  modified_base 11..12: mod_base = OTHER; note = Uracil
  modified_base 15: mod_base = OTHER; note = Uracil
  modified_base 20..21: mod_base = OTHER; note = Uracil
ttcctcaaagttcctcgactt

SEQ ID NO: 413 - DNA, 82 bp, synthetic construct
  misc_feature 1..82: note = Synthetic Polynucleotide
  misc_feature 26..65: note = n is a, c, g, t or u
  source 1..82: mol_type = other DNA
tctcggatcctcagcgagtcgtctgnnnnnnnnnnnnnnnnnnnnnnnnnnnnnnnnnnnnnnnnccgcatcgtcctcccta

SEQ ID NO: 414 - protein, 501 aa, synthetic construct
  REGION 1..501: note = Synthetic Polypeptide
MQVCSQPQRGCVREQSAINTAPPSAHNAASPGGARGHRVPLTEACKDSRIGGMMKTLLLFVGLLLTWESGQVLGDQTVSDNELQEMSNQGSKYVNKEIQNAVNGVKQIKTLIEKTNEERKTLLSNLEEAKKKKEDALNETRESETKLKELPGVCNETMMALWEECKPCLKQTCMKFYARVCRSGSGLVGRQLEEFLNQSSPFYFWMNGDRIDSLLENDRQQTHMLDVMQDHFSRASSIIDELFQDRFFTREPQDTYHYLPFSLPHRRPHFFFPKSRIVRSLMPFSPYEPLNFHAMFQPFLEMIHEAQQAMDIHFHSPAFQHPPTEFIREGDDDRTVCREIRHNSTGCLRMKDQCDKCREILSVDCSTNNPSQAKLRRELDESLQVAERLTRKYNELLKSYQWKMLNTSSLLEQLNEQFNWVSRLANLTQGEDQYYLRVTTVASHTSDSDVPSGVTEVVVKLFDSDPITVTVPVEVSRKNPKFMETVAEKALQEYRKKHREE

SEQ ID NO: 415 - DNA, 103 bp, synthetic construct
  misc_feature 1..103: note = Synthetic Polynucleotide
  source 1..103: mol_type = other DNA
  modified_base 9: mod_base = OTHER; note = Uracil
  modified_base 15..16: mod_base = OTHER; note = Uracil
  modified_base 23..24: mod_base = OTHER; note = Uracil
  modified_base 37: mod_base = OTHER; note = Uracil
  modified_base 39: mod_base = OTHER; note = Uracil
  modified_base 42: mod_base = OTHER; note = Uracil
  modified_base 47: mod_base = OTHER; note = Uracil
  modified_base 49..50: mod_base = OTHER; note = Uracil
  modified_base 52: mod_base = OTHER; note = Uracil
  modified_base 63: mod_base = OTHER; note = Uracil
  modified_base 67: mod_base = OTHER; note = Uracil
  modified_base 73: mod_base = OTHER; note = Uracil
gaggacgatgcggattaccaacttgaacgccgagagtgtggtcacgtgttctgcaggacgactcgctgaggatccgagacccaattctgagatgtgtaaagat

SEQ ID NO: 416 - DNA, 21 bp, Synthetic construct
  misc_feature 1..21: note = Synthetic Polynucleotide
  source 1..21: mol_type = other DNA
  modified_base 1..2: mod_base = OTHER; note = Uracil
  modified_base 8: mod_base = OTHER; note = Uracil
  modified_base 10: mod_base = OTHER; note = Uracil
  modified_base 16..18: mod_base = OTHER; note = Uracil
  modified_base 20: mod_base = OTHER; note = Uracil
ttaagactctacacatttcta
